United States Patent Application Publication US 2026/0191916 A1 - sequence listing, part 98

SEQ ID NO: 636 - DNA, 5066780 bp, Parabacteroides merdae (residues 1,688,928-3,377,854 of 5,066,780)
  source 1..5066780: mol_type = genomic DNA
ttagatagtaatgaaagcagaacaacaatatatcgatcttttcacccattatgaggatctgatttgccggcatgcggcggggttgatgaatttgccgcgtgcagaggctttggctgatttggaacggttgggctttccgacggtgaagagtgaagattataaatatacagatgtggcgcaggcttttgctccggattacggggtgaatatcaatcgtcttgatatcccggtcaatccgtacgacgtgtttcgttgtgatgtccccaacctgagtacctcgctttattttgtggtgaatgatactttctatgacaagatgttaccgaaagcccatcttcccgaaggtgtttatgccgggggaatgcgtactttcatggaaaagtatcccgaagtggcttcccgctattatggcaaggcggcaccaaccggtaaggatggtatcgttgccttgaacactatgttggctcaggacggttttgtggtctatgtgccggaaggtgtcgtagtggagcgtccgatccagttggtgaatatcttccgcagcgatgtagacacgatggcgaaccgccgtatcctggtgattatggagcctcgttcggaagccaagctgttggtgtgcgatcatagcatcgacgatgttaagttcttagccacgcaggttgttgagatctttgcgggtgaaggtgccttcttcgattattacgacctcgaagagagcagcatgtcgactactcgttttgcctccgtgcatgtgaagcaggaagcgggaagtaatgttttggtgaatggtatcacgctgaataacggccttacccgtaacaactattatatcgagctgaacggcgaacaggctgaagcgactttgtgcggtatgtcgatcctggacaaagaacagcagctggatacctatagccatattacgcatgccgtacctcattgtactagcaacgaactgttcaagaatgttttggacgatcatgcggtcggtgcgttcagcggccgtatcttagtgaaggaagatgcacagaagactgcggcctatcagacgaaccgcaatctttgtgcgacccgtgaagctcgcatgtacagcaaacctcagttggaaatctatgccgacgatgtgaaatgttcgcatggcatgaccaccggacagttggacgaaactgctttgttctatatgcagagccgcggcattcctcgtgacgaggcacgcatgttgttaagcgtagctttcaccgcggacgtgatcgattacgtacgtctggatgctttgaaagaccgtttgcataaattagtagaaaaacgttttcgtggagaactggcgagatgtgccggttgccggatttgtaaataagaataacatatgcaattggctcatatcgctatctggacgaacgaactggaacgttcgcgtgatttctatatcaagtatttcaatgggaaaagcaacgagaagtatgtgaatccgaagaaaggctttgtctcttatttcgtcactttcgagggaggggcttcacttgaaatcatgcagcggaccgatattaccaaagaaacggcagatgtcttcatcggacttgcccattttgccttttctaccggatcgaaagagaaggtggatgccatgatcgaacaattccgttcggacggttacaagatcgtaggcgagccgcgtattactggtgacggttattatgaaggagctgttttggatccggatggtaacattgttgaggtgatcgcttgacggaaacgtaccgggattgatattaccagacgcagataaatacggaagggcgctgagttatgcggacatcattggtaagataagtccgcatgattctgcgctcttttgttttcggtactcagtaaagtcagacagccgtgtatgggcggaaaggccggatcagttcatataggataagaataccaacagaggtatgtagtctttcagattgacatgtaactttttcagagcctgggcgatatggtattccacgcctttggttgtcataccgagtgtttctgcgatctctttgtaaggtttgttttcgtagcgactcatgatgaagatacggcgggtctgttctggcagggaggccaatgtcttgttcacgatttcttgtgcttcggctgtaaacagttcttccgggttgcaggcttcgagggtggagatgcgggtgttcagttcccattcggcatgattcttcagatgttcgctggcatcttccctgacttgtatatgttgcaggtagttgatacatttgtttttgatgatcgtgagtatataggccggaacattggaatcggcctttaacgtgttccggttttcccagtattgcatcagtgcctctatggtgaaatcttcggcaacagctatatccctcacatatatattcgcaaagcggatgaaccgtccttgataatctgcgaataattgattgaaggcctttaaatctgctgaatattccatataccctatcgattagcgcgtaaatataataaaatttaaaagaaaagctatatttattccacgtagattacctttccgatttttaccgcttccttctctatattgaaaattcctgccctgtgtctggtaggacggtgaggcagagcaggaatatgtaaatgatttttttatgcgtcgttctttataaccccattgaaggtggaagcgatccggcggaagaagcccattctttattggggctatctcccatgacgaacgaaaggatgcctccgttcatgatgtctttgtggaggatgtagctcttgtcgtatggctgaccgttaagggtagccgactgaatgtagatattcttttccgatgcccctttggcttcgattgtgaatttcttgccgttttcaagtgtgataacgctttcttcgaatgacgggctgccgatcacgtagtagggcatgcccggacagaccggatagaagccgaccatgctgaagaccagccaggatgacatctggccggcatcgtcgttgccggatagtccgtcgggagtcgtgaaatactcgcggttgatgatatcatgtacccatttttgtgtcttccaaggttcaccggcataagcgaaaagataggcgatgtggtgtcccggctcgttgccatgccagtaatagttcccttcgaagaagttgtccagacggttgatgaaacgttcttttccgcccatgtgccggatcagtccggctatgtcctggggagcataccaggtgtagtggtaaggagtcccttcacagatgaacgaagtggaggcaaacggatcgaacggctcgatccaggttccgtcggcatggcgtccacgggcatagcctgtttcggggtcgattacgttccggtagttttccgcccgtttgatgagtgctttataatcgtctgtcttgcctaacttcttggcaacctgtgcaaggacaaaatcatcataggcatattccagtgtgcgggatacttgttcacgacggtggaatgcttccgttacttgatcctctaacggcacgtaattgtatttcaggtaagactccattgcccgtcggcctttcccgtcgcgatagctggcggagtccggattggcctcgaaagcgtttttgcgcatcagcgtgtaagcttcttcatagtcaaaacccggagtgtctttgacgatggcgtctccgatcatggcgatgcagtggtcaccgatcatggcagccgtgtagctattccaggacgggaagatgggcaaccaaccgccttgctgtccttttaacacgagcgaatgtgccatatccccgttgcgggaaggggtgaggatggagaatagagggtggacggcacggtaggtatcccattgcgagaagtcgcaatagtaggttccgtggtccatcttcataatctgtccgtcaccgtcgaatctcggataggagccgtccacgtcgctgaacgtgcggggcaggaagtgtgcgttgtagagagctgaatagaatttgaccatttctttttcgttgtttccttttactgcgatttgccccaatgcctggttccagatgtcggaggatgcctgtcgcacttcgttgaagttccatctcggaatttcggcagccaagtttttgcgagcattgtcgatgctcgtaaaggaagtggcaactttgaccagtattttccccggcttatcggaagccagcttgatccaagctccgacagcatgtttttgtccttttgccgattttcgtccggggatgatcgtggtgctgtcccaaacgccatagtcggcaatctcttcattcagctgaatcacgaaatgtccgctgaatccggcttccttaccgtatccttggtagatgcggtgtacggggttgtaaccggtaatttcttttttctccggattgatttcgacgaaggcgacaccttcatcactattgggttcgatcacgatatagtggtcgccatcctgttcgaagcagaattgcatgatgcctgcacgggagagtccggtcaattcggcatggatgtcatagtcgttcaagtcgaccgaataataggagggagttgctgtttcctgagtgtggtcgaaagtggaggcgcgtttgaccgggtctatttcgagcttgttgctgagcggcataattgtgacgctgccgtagtcttgtgtacaggagccgttcatccagtggctggcccggaatccttggattgcatcctggaaataatagtagggaggatgacatttctgttcggtcgcctgtgtctgtgccacccagttggtcataccgtgtggaaccccgactgccggcatgatttgtccgcgttcttccgtcgagttcttgtcttttccttgtacgatgcggatatctgtaccgatcagcgggtctacatatttttcaaatttattttcctgttggttgcatgagaataaacacaacgtacttaataaaattgtccagctcttcatgttatattattttaggtatgctgtaaagatagaaaaaaagcaggaaagtgtatcaaaactatcctttgttcccgcgcttgatgcgggatcgcattatatcaagcgcgggaacaaggggattttgatacactttcttttcgattaatttcgggattcgattctatagtcgttctgtgtcagtttcggattgacatcgatctgcttttgcggaatcgggcagataaggtttgtttcgtttagggagaatcctttacttctcatcacttcaacagcacgtccggtgcggattaagtcgaaccagcgatgattttcgaatgccagttccacgcggcgttcctgttctaccatcagggcgaactgggccttgtcggttgtctgcaggtcgaccgggctggtctctgtcgtctgataaccgaaaccacgccggcgtgtcatattcagatatttgcaggcttctgccgtttttccgttctggttcaatgcttcggcatacatcaggatcacatcggcatagcggattaccggatagttgttgctggcatcattgttctgataaggaacatccatgaacttgcagacatagcgggattccacccattcgttgtttttgcggttatcgtaatatccgagggacatggagaaatcacggcgaaggtcgccttcttcataagcattgtagatgtccatttccgggatattattaccacctgtaccaccgactgccaccacattcgttcctgagttttcaggtgcgaagttattggcatagttggaaccttcgccatagccgcctttcagaaactggatttcgaaaatgccttcctcgctgttgtggttaactgggctgaacacgtttttgtagccgtcgatgttcaggctgcccggtgtattttccaacaaactgtaccgtccgctgttgatgatttcagccaagatagtttccgcttctgcatatttgtgcaaagtcatgtagacgtttgccaataatgctttggctgctccttgggttgcacgcccgtcttcggctgtcgaataggaaacagggagatcttgtgcctctttcaggtcggcgatgatttggttgtaaacattttcttttggttcacgcaggatgtcgtaagattccgagatgctgatctctttcagtaccagaggcacatcgccgtagacacggaccaggttgaaatacatcagggcacggataaacttgcattccagtttataccggtttgccagttcagtattgatttcgatcccgtcgatacgtcctaagaccgtattggtacggttgataactttgtaggctgctttccagaaattggcgatcatactgttctgcgtgtcgatgtagaactggtcgaactcattctgagtggttactgaaccggagagctggttgcgggtattgtcggagggaatttctccgaaaacataccagttaccgtatatgtcaccttcctgtagagaagagtaggctccgtttactgccgagaggatgtcgtcggccgttttgtagaaatcgttttcacttaaatccgtttgcggattctgttccaggaagtcactgcaggatgagaagctaaatcccagaagggctattgcgatcagattatattttagtttcataatttgtctgctatttaaaaggttacgttaataccgaaagtacaggtgcgatacagcgggtacataccgtagtcggtaccgggagccgtcacgttgtcttccttgaaacttgtttccgggttgtagccgctataacttgtgatcgtcagcagattttgtgtggaaacatatacgcgtgcacgttggatgctgcatttcttggtgaatgcttcaggcagcgtataaccgacagtcaggttgtttacacggaggaaagaaccgtcctctacccagcgtgaggaaatggcattgttctgcccggtcggctgtgagttggctctcggaatccatccgttacccgggtttgattctgattgccagcgtcccatcatctctttcagctgattctggttaccttcgccctgtgtgtagaagcgtctacccaagtgtagcacttcatttccgacaaccccttgtagggatatactggcatcgaagttcttgaaggtgaaggagtgtgtcataccccaggtaaagtctggcatattgttaccgatgattgtgcggtcgtcggcatcgattttatgatctccgttgacgtcttcgaacatgacgtcacccacttgcgtgtcggccagatgaggatatgaatccagttcttctttcgttttgaagattcccagcattttatacccgtagaaagcaccgatcggttggcctaccattgtgacgtgggttgttccggcaccgccgtcgctgaagatcggatctcctgtcggtcctaaagccaatactttgttacggttgacagaaatattcccggttgcatcccaagtaaagtctttgcctctgaacggagtaccgctaagggtgatttcaagacctttgttacgcatttttccgatattctgcatagccttttcgaatccggtgattgtcggaatatctacatccatcaacaggtcggtagtcttacggtagtataggtccagagacaaagacagacggctgtccaaaacggagatttcgaaaccgagatcagtctggcgtgtcttttcccaagtcaggtcagcgttggagaagctcttttgggctgcaccgtttacgatattacccgtacccgttcccaatacatagttagcattttccatgataccgatcgacgcataatcaccgatattattgttacctgtgataccgtagcttgcgcggatcttcatgtccgacagccattttacatctttcagaaagtcttcctgagacagacgccatgctactgatccggaaggaaaataaccgtagcggttgtttttgccgaaacgggaagaaccgtccgcacggatggatgcggtcaggtagtatttgttgttataacgatagttgacacgtgccagataggagagcaatgtccaggtcttgcgttctgacttgctgctttttactgttgcattgttgagtgtctgtattttatcattcgggaaatcggaacccgtagcctctgtgtagcggtagatgtttttctgtgcagtgacaccggcaacagcgtcgagttcgtgcttaccccacgattcgaaataagtaatcgtattttcgttcagccagttgataacttcggttgacttctctgtcgcttttctttccgttgaagggagaggagccacgttaccgttattaggaatggttgccggacggaagtattcgcctctgtattcgcggatatcggcaccgatggtagatttcagtttcaggtttttcaacaaggaaagttcgatataaccgttgctgaacaggcggagatctgtgtcgtagttgtggatatgtgtcaaggccacagcattcggtacaccggtcaatccgtcgctagcgacggcgtacatggactgtgaagcccatgtaccgtcttcattgtatacaggtactacgggagatgtcgccaaagctgcattgatgacaccgtcacttgcccagtggccttgggttgtcttgttcgcgttcatgtaagtcggagccagattgacacccagcttcaaccaactgttcagttcgctgtcgattttggctcttgccgagaatcgttcataatcactgttgataacgacaccttgctggttgaaatagccggcagagaacatatatttagtcttttcatcgccaccagttactgtcaactggtagttttgtacgggggaagtgcggaaaatttcgtcttgccaatccgtaccggcacctaaagaggcaatataggcggcatcgtcgtagatagccgggtaacgataacggtttccggacggacgcatactcagcggatcgctagcggatgctccaggaaccttgctgatgtagttgttattgaaggcttcccggctgaattcgacaaattcctgcgcgttcatcaggtccatcttctttgttacgttctggaaacctgcatagatatccaagcttacgctgaccttgccggtctttcccgacttggttgtgaccaatacgacaccgttggctgcacgcgaaccgtagatcgcggctgccgaagcatctttcaatacttcgatagattcaatatcattcgggttgatcgcattcaggttttgttctcccagcggatatccgtcgacaacatacaacggggcgctggatgccgtgatggagccggacccgcgcacacggattgtggccgcttgtcccggttgccctccgacttgttgtacctgtacaccggccagttttccggccatagcttctgtcagatgcgacactttgaggtctttcatcgaactgctgctcaattgtgaaacggctcctgtcaagtcttttttcttcatgacaccgtagccgactactacaacttcgtccagtgcttcggagtcttcctggagagtaatattaaaggtggtctgattccctacgcgtatttcttgtggagtaaatccgatgtaggagataacgagggtagcgtttgcgggcacattctcaagcatgaatttaccatccatgtccgtaatgttcccgtttgtcgttccttttacgataatgttggcaccggctatagggccgagtgcgtcttgtacgattcctgtgatggtctttccgttttgttgcaaacgtgtaggaactgccgagtccgattttccccgcaggctcgttgcagggtccgtgatgtaattctcatttgccagaacactgatgctgggcaaaagagaaagcaggcaaattattgccattttgttatttttcatgtttacatggtgatttaagttactactaataagttaactatataaatattaagaatagccgtggttattctctatatgcaaagattctttgacttcatggtcccattggataactgatttaggtttatatttattagatgctgtttattcacgatctctgatttcattcaatattctgcaaatatagataaagttattattaaacaaaaaaaattaacagttattctgggctattccgaatataactgttaatttattccaattgtttttgcctctatcagaagcggaaatacaattttccactgacattattttccggtccgtttcctctggcacgatgcggttgagattgaggaccgaaatcttccgcttttccgaatttggttccgacagccggaattgcattcatgaaagagaggtttccttttggatagtcgacaatcgtgtggttgcgtttcggatcgtattgttcttgtacggctggggtaaagagatgcaaggtgacatcttcttttccgctgtaaacttcgaatggagtggggcaatcgagcttcatcccgtagaataaagaatagtatcctttgaattccggatagtcccaactttcaccagtgatagtgttgttatacttcttttcccagatattcagcgaaccgcctttcatccggttgttgtatacacggtatggtccgttggcgagcaaagtggctccggcgatctctttttctgggaaatcgaacgtgatacccgccatcttgaccatgtcctgggggcggtaattgtagtccagttctacgatgccggaagggagcatggtccaagtgaatgtgtagactgtattttttccgtttcgggacgtataagtggcaatcagttgaggatttccttccacttgcttatattctactgatttacaaataatatcttgattggatatcagtaccggcccattgttcaacgggattgctttacctccggaagtgactgaccggagcaggccgttttgtttgtcgaacgttacttccgtaccggcagccgaaaaataccagttatcgatgctttcttttacagccggtgtgctaccttcctgtggcagcagacggttggcaagacggtcgggtgtgccgatctcgtagctccaggtaaataactcttggttgtaacggtcttttaccgtaacatatagaaagtcgtattcctgccagccggagggaagttcaagttgcaaataccctctttctcccggacggatatcaggggaagcgatcttgccggaaaccgattgtatggtcttttgcgcaagcgagttgattttagccagccggtatgtgtagttacaagcgttcgcatttgtgaacgcatatctgttttctatttcgaaacgaccatcccatcccggtgtaagatagtgttccggcagatggataggcgaccatatttctttgattgtaaagaagctgccttctttttctcgatatggtcctactatgccatcggctccgtgatccttgtcggtatcgtagaatccgtttttatcttcgcgaacaactgcctggtccgtaaagtcccaaaggaacattccggctgaaagcggattggaaagcatcaggtcccagtagtcgtcgagtccggctccgtgtccaccgtcgtataatccgtgcaggatttctgtcggcatgaagatatcccttccgtggaacatattgccgattccagaattatatttgatgtaatgtactgtattgatatttcccgataacgcccagggatgcaggacagctcgtttttgcgggtcatattgtggaaatagcgggtcgaggtcaaaattgaagcctccctcattcccgtttgcccaaaaaatgatagacggacggttgagatcccgtttcagcatttccccaactagaatggtcccgactttcgtatcataaggaggatattgccaggcgcacagttcgtcgatcacatacatccccagagagtcgcaaacttccaggaaatgtttgtcaggtggatagtgtgacatgcggactgcattcatgttcatttctttcatcagcttgacgtcgttaatactaagctgcttgttcgtcgttcgtcccgtagtgggccagtgagagtggcggttcacccctttaaagcgcattttcacaccgttgatatagacaccgtctttcggtttcacttcgactgtgcggaacccgatccggtcggttacggtatgcagtaccttgtctttctggcgaagggtgattatggcggtgtacagttgtgggtcttcggctgaccagggtttgatattgtcgatcttgccagagagggatattttgcctgttttttcgtttatgggagcagatgtgattttccctatcgtctggttctggacatctttgatctctatttctgcttttatgtcggaaagtttcttgtctataaatatatctgcgttcagttcgccatgttgccgggcatcgatcgccgtatattcgatgaagttgttaggaacagcttcgaggtaaaccggacggaatatgcctccgaatacccaaaaatcacattgccgttctgcttcgttgatactggtattggatgacattttgttcactttgacttccaaaaggttttccttgttcatatggaccagtttggttatctctcgcttgaatcggtagaaagctccctgatggggagtacctgcctgttttccgtttaccttaatctccgtatcggtcatggaaccttcgaaaacgataaatatacgtttgcctttccatgtcgccggtacttcgaatgttgttttatacaatccggattcgtcggctttcggcttgtcatgtccgtaattgaaggttccgtatccttccatttcccagcaggagggaaccttgatcttattccattccccgcttttcctgccaccggtacagaagaagtcccattcgaccgcatcgtccgagccttgtcctgacaggtattttacatcagtggtctgcccgcttgctaacaggctacctaataaaaataaaaaagaataaaaacatttcattatatagtaagaattaaaaggttatctaaaaaatagggatggtaattgatgatttatccgttacttttggcttgacccaaaagtaacagataaatcatcaattatcgaattaccacagcggatgctgtttcagattcggatttttatccgtttcgtcctgaggcaaaggtaatgaataatatttatcatctacagctctgcccaagcgctctgccatgcaatgctgccgtttcatgtcgaataaggaatgtccttcggctgcgaactcccaagtacgttcctgtatgattgctttccgcaaatctgtctgtgaaatggatgaagggatcggattgagtccggctcttgcccgtacccgattgatacctgtcagtgcatctccgatgcgattcatttcgcaataggcttcggactgcattaacaaaacatctgcgtagcgtatgatttttctgttgcaactatagtctccggccgaagttgattgattgtcgttcggatcaagatatttagcaaagtggcaaagaggaaaagagggttctgctatattatccgggtcataaacatattgtttgccattatttatatcggtaaattctgtaacaaacgtagtggagattcgtttgtcttccacttcatatgatttataaaattccggggtagaaatgaatgaagaccatccgtccgttttttttatgttataaccacgcattccagttatggcaggtgagtcgtttccattgatgtttgtttggaattcgatatcaaaaatatactcttttccatgttcgtttgtcacgtcgaaaattcgtcggaaattttcttccaatccataaccaaaagtcccttcattattaataatatcagttgtttgagaagctgccttttcccaaaaaccgcttttgttccaaggccatccggcttgtgtcaggtagacttttgccaacatagccattgctgcaccttttgttgcacgtccggcattcgaatcttcccattttatcggtagagcagaacctgcatacaataagtcttcttcaattaaagcccaggctgcgtcatctgttccttggttggaaggagcttcatcatttaagttgtcggtttctcggatgacaacaatatggtcataaaagcgtatcagatcaaaataagctaaagcgcgtaagaattttgtttgtccgacaatctgctttcttacctcttctgatttgaatgtgatattatcgatgttcagtaataaattgtttgcacgccgaatggcagaataggagatttgccaaatgtttttacaaaaatcagtggtcggtgtccaagttaaattgtccatttctacacgcgaaggagcgcttgcattggcattggccgcttcgccgggaaaatcagctcccatccaaatataacgcctatagcttttttcatcggcaaatgtattgtagacagctgtcagtgcagcatttgcatcggcttccgttttgtagaaattgtcgggtgtgatgaattcatatgcttcttcatccagaaagttgcaagaggaagaggacaccagtaatgctaatccgattatatatttatgtagtttcatattcaattcgttttaaatgattaaaaaccaatgtttacaccaagaatgaaagagcgagcagtcgggtaggcattgtaatccacacctaactgaagattgctttgtccttgactatttacttctggattgtatccggaatagccggtgatagtcagtaaattctgtgcggttgcataaatacgtaaagaacgaaggaatgaaactttggggaatgtgtaacctaaagtgacattttgtatgcgtaaaaaggaaccgtcctcaatcagatagtcggactgtaacaagttttggtttactaacacgtgagcacgcgggtatttaccgttcgggttgttgacagtccaacggtccttcacttctgcccgctgattaccccatgcactgacgatatttgtttcggcacgtaatacattataaatgtcattaccgacggaaccattgatataaacagataaatcaaaattcttataagagaaattgttggtccaaccaaagatgaaatccggattcgggtcgccaacgatctgacggtcttctccaaaactgattttgccatctccattcttatccacaaaactcatatctcctattttgtcgaagttggaatctgcaacacgagcagcgtcttgccattctttttccgtacgcatcacaccgtttgttttcaacaagttccatacaccgactggtaatcctggctcaagccagctaccgtttactttcaggtgtccggagatcgtaccttgctgggtcgggatatatccggggatttccagcactttatttttgttggttgaccagttaagcatggtgttccatttgaatggacctgtcagaacatcggctgatagacttagttcaagacctttgttttgcaaactgccaatatttttcaaaacagtaccgaaaccagttgtcaatggaacggaaatgttccataacagatcggttgtctttttatagtaatagtctgctgtgaaattgatgcgattgttgaatactcccaagtcgatcccgatatcggtgatggcagtggtttcccatttcaaatcaggatttggcatgttaccggcaccgataccaacactagttacccctccgattgggtatgtatatgtattcatcttttcgggagacgaataagccggaatattttggttacctgtcacaccccaactacctctgattttcaaattgctgatccaatcaatatttttcatgaatttttcttgattgatacgccatgcagcggcgaatgaggggaagaatgcccatttgttatttgcaccaaatttggagcttccatcggctcgtcctgttacagtgaaaagatatttgtccattaggacataattgatacggccgaaaccagataataatgtgcttttactccttccggtatttggtttgtcccattgtgcaccggcatctaaattgttatatccgtatacgtcactgataaaatcacgtgcagtcatagaaccggtcttgttttcttcgtacaacagagaagaaccgaccatgacattcagagagtgttggccgatttttttgatataagtcaatacgttttcatttgaataggaactacttctacggctttgttgttctgcaatgccattagcattgtagcctctgtacgtctctttcggttcgtacacttcacgtgacgcgtttgacatatctgctcctccactgacttttagtgtcagtccgtcgatgatgtggaatgtcaggtcggcagaagccaatatacgatcgatggtccctttatcttgaagatgtttaacgtagggaaccggattcggaacggtagaagatcctggcagatagtttaaacggacgtattctccagttgtcggatcgtatatcggaactgtaggcggcatgacgagtgatgcattgatgatggaagtgtttcctcctccatctccgttttcacgcccggtattggcaaaaacacggctgatcgtaaggctggtggacaggtcgacaactttagagattttcgtatcgatgttgtttcgcaaggatacacggttgaaatcttgatttttaacaacaccttcttgtccaaagtaacttgcaacgacagcaaattttgtgttttcgcttcctccgtttactgaaacattgtggctatgtataggagcagtacggaaaatttgatcttgccaatctgtcccttcgcccaattgactcattgcaggatacaaagggtcagaagatgtatttgagtaataaatgggacgaccatcggtttcagctccctcgtttaccatttcagcccattctgtagcgttcatcatatccagtttcttggcaacatgctgaaaaccgacataaccgtcataagtaaccgtcgttttcccctgtttaccccttttggtcgtgatcaggataacgccattggctccacgtgaaccatagatggaagtggcggaagcgtctttcaggatttccatgctttcgatatcgccagggttcaaagtcgccagcgggttctgtccggcaccggaaccaccggccgaaccgcctgccgtaacaggataaccgtcgattacgtataaaggctggttacctgaagtcaatgagttgccgccacgaatgcgaatatcgacaacaccgcccggagaaccggaagttgccataacctgcacaccggccactttgccttgtaagccctggtcgaaagatgaaatcgcctgtttctggattacgtccgactttacggagccgacggaacccgtcaagtcgcttttacgcatcacaccgtagcctacgacgaccacttcatccaacgcttttgtgtcttccgttagtttgatcgtcagcgatgatttgtttcccaccggcatatccagcgtgttgaaaccgatataggaaatttgcagcacggctttcggattaacggtgagggtgaactgtccgttcatgtcggtaatcgtaccgttggtcgttcctttttctacgatattggctccgatgaccggttcgcctgtcgcatcttttacgataccggtgatggtttgtcctttttgttgtaaactgaccggagcggctttttcgtctttcgagatgatgatctgtcggtcggagatgtaataatgtgtgtcggttccttcgaatatctgatcgagaatcttgcttacctgttctttccgtgctttgacggatacttttcggttcaggtcgactgagttgtccagatagaaaaagatatattcgctctctttctcgattttattaaatacttctttcaccgtgaggttgttcgattcgatggtgaagaatgtctcttgcgagtatgtctctgctgctaggcagaaattcatactcatccacaaaaaaagtagacaaatactaaaccttgtgttatttttcatatcgcttgtaatgatttaagttggtaaagagtttttatagttctcatctttgtgtgggaaggaagtgtgttcccttcctgtgtcgttgtgatttaaggatccatactgtatggtttttaatgtttgacttttatttctatactctcatatttgttttctatttgaatcggggccgcttctttcaaggccttcatcatttcgtccagactctctttcaggtctagttttccgctgcaggacaatttgtcggccggctctttgcaatagatacggactccgtaatagcgggaaagctttttcacgatttctttgagcggctgttggtggaactggtaatatccgtctttccaagccacataatcgtcggtatcgactgttgtgattttccctttatgtattttgctgtcgtaggaaaacatctggttaggagccaggacattcttgcatttgtcgaggtttacttcaacttttccactgactaggaccacctgcatattcgcttcgttttcataggccgtgacattgaattgtgttcctaatacctttatatccatctgatgtgttttgacgatgaaaggtttttgttcatcccggctgacgtgcaggtatatttctccttctacgaatatttctcttttctcttttgcgaatttgactggatatacgactttcgagccggagtttacccagagccgggtcccatcggcgaatgtgatggacgaacgccggccgacaggtacgatcagttggttaaattcctgtgcctgtgccggattgccttttggactgaggtccacttgtttggagttgacatttacctttccttcctttttatattcgagttgggtttccgtcccgtcaatggtcagcttctcgttgttggaaaggaccagttgcactttttcatttgtactgtctggtgccggattggcttggatgattgccagatagtctgtttcggcatctttcggccgcagggtggcataccagccgattgctgataacaaaagaagagaggctaccgtgctgatagcaagacggatgaattgtttacgcttcgcttttctctctgtttctttattttttaattcgatgcgttgccataacgcatgttcatccttggcagccaaggatgaacaatttctgtctattttaatagtgtgtaggaagagacgggcattttcgatctcttgggataatgtggcactttttatctgaagatcgctccaaaaagcccggcttttttcagtcgggtgtaattccgactgaatgaaaaagtcgtcgttcagcagttggtctgcactgtatgttgtatagtctttatccatttttccgatgagcattctataataaaggacaaggtcgcttccattttatactcaccggaagtaaactttttttatttttcttattggacggaaatggataggagcaggaggaatacttccgctggcccgtataggtcgcgtatcttctttagggagcgctggataaggttttgtgcggactgataattcatgtccatcatgatgcagatttcatcgaagctaagttcttgtatatagcgatagtaaatgatctctttttggcgtggagtcagtacattcagaatttcctgtatcttcctttgttggttggtgtacagttcgtccgtgacatattgttcttcgaccgtcagtccgagggtaaaggaaacagtttcatgattgtaagatgtgtagcggtcttctcggtaaagtgcattgatcaggctattcttaagggagacaagcaagtagacttttatatttttaggtgtgatcagttgtttcctgtttttgtataatccggtaaaaacatcctggatgcaatcttttataagttccgtatcggaggtaaagctgtgtccgtaacggaacagcatttgtatgtagactttgtatatccagcaataagcctcattatcgccggctaggaactgactccattttattttgctttcatcttcctgcataattgtgctgtatggtcgcaaatataatatttttgttagaataacggaaacttaccgcaacttcgttagggcaacctcaccaaaaccgtggtcaaaaaagcaggtattccactggattataatcagaaacagtgcataaaatctcctcaaacaaggcagataaacagctccacatccccgttccggtttcacgaagatccgggtctccacctcttccacacccggatctcccatgcccttccacccgggtctgaagaaacttttcaagttgtttttggtaaaaaagtagcttgtcttcatgaaaaaacgagcctatttaatctgttttgtattagcttcagaatatatctgaaatttgatagaatgttgatatataatgatttattatttttacccatgatagttatgatagataaatgatagttaaaaataggaactatcatggagtaacatgctgttttacaattatataaatttgattatgatagtatgatagttgttttgctcaaaaaactttatatagaaatacccgtactaaagacaaggattgattgtcccttatgattttggtgcggttacactacaacttcgttcagagcttcggaatctttcaggagagtattttaaaatattcccgatccttcttggaaggagctattattgcaggtttccaagactgtgaatgatgacaaacaggggttctggttggaacggatatttcttgaaaaagaacgtagttccaagagaactatggtattcgatatcggaagaaaaaatataaaaatgaaattttttccattttcaactggggatataggcttgtgaactgttagtattatgtaagcataagtaaaaagatgaaaaatggacagggaaacgttatataagttctttgaaggagccgcttcttatgaagaagaagtccggatccggcaatggatggaacattccccggaaaacagacgagaattcttgaaagagagaaagatattcgactcgatgttgcttcttggcgatgaaaaaacgatcgaagaaaagatgcgacacaagtcatggagcttgagttctcttggaactgagttaatcaagattgcggcagctgtcgctgtgacattggggcttagcttattatatcaatttgtttcaaataaaaatggagttgtgccgatgcaatccatttatgttcctaccggacaacgggtgaacatcacgctgtcggacgggacgaatgtctggctgaatgctcggacgaagatcgtttacccggctgtgttcgacaagtccgtacgccaggtagcggtagacggagaagcctatttcgatgtggccaaagataagaaaaggccttttatcgtggaaacgggcaaatgtaatatggaagtgctgggaacaaaatttaatgtggaaggctattccgataaagacgattttgaggttacgttgatggaaggaagtgtgcgagttgcctcccgtatcggtctgggggatactttgatgttgaaaccggacagcaaagcttgcctgcaaaaggacggcaggctgaaagtcattccggttgacgattacaatccctatcgttggaaagaaggactgatatgttttcggaacgaatcgttcctctcgatcatgagtgatctggagaaatatttcggagtcagcatagttgttgagaataagaatgtattgaaatactatttcacgggaaagttcaggcaagcagacggtatcgactatgcgttgagggtattgcagagggatatccgtttcaagtatgaacgggacgatgaaaatcagattatttatattaggtgaacacaagtaatagaagaacagaaataaaaaacacaataattagtattaaccttataaaataaaaaggaaacatgaaaacaggcagtcaataacagaaaaatgccggcaagcgctggggggcatttaccggcattccaatcaacacaatttttttaattcattgtattaacttcaaatcagttacaaaggtatgaaaaaaaactttttgtcggggggatattatccgaaaactccgtcaggtaaaaaaatcttgagaactatgcgaatatccacattccttttgggagcctgcgtattctgttcgtatgctgaagattcacattcgcagaatgcccgggttagtattaacaagaacaattctcaattagaggaaattctaaatgagattgaaagtcagacagattatttgtttatctataataaccaggtagatgttaaccggaaagtttcggtaaaggcgaaaacgaaacctgtttcagaggtattggataacctgttcaagaatgcgggtatcgaatatgaaatggaaggaactcatattattttgtcttcgaaaagccgggatgcgatcgctgccgctcaacagcagacacatgtcttaaccggtcggattgtcgataacaacggcgaagcgatcattggagcgaacgtggtggtgaaaggtactacaaatggtacggttaccgatatagatggtaatttctctatcgaggccgatcctaattcggttttgaatatttcttatattggttacctgtcaaaggagatcgttgtcggtaaccaaaaaacaatcaatgtcgtattattggaagatacgaaaacgctggatgaagttgtcgtgatcggttacggtacgcagaaaaaggcggacttgaccggttctgtagctaacgtgagcacagatgatttgaatacacagagcaacactactatcgggcaggccttgcaaggtaagattgccggtgtggatatcgtttcgcagggtggtgcgccgggcggtagtacccgtgtcatggtccgtggtatcggaacgttgaacaattcttctcctttgtatatcgtggacggtatgtatatgagtggaatcgatcatatcaatccgaacgatattgccagtatcgatgtgttgaaagatgcttcttcggctgcgatttacggttcacgtgcagctaacggcgtcgttatagtaacgacaaaagagggaagcaatacggaagggaaaccgattatcgatctatcggccaatgtcggcgtcagttcgccttccaaatatctggatttattggatgctgcaggctgggcggaagtgacgaccgtttccagaagggctgccggattgagtccgctcgaaatggcacaggatttggcttcaaaaccggataatgactggcaggacttgatgtttggtccggcattgatgcaaaactatgcgctttctgtgaagggaggaggtaaatattccacctactataatagtgtggggtatacgaatcaggacggcgtgatgaaaggcacgaactaccagcgttacacgttgcagagcaaacaggatttcaagaagggtattttccaggctgggacaaatgtcgtgttgacttatgatcaaagcaatcctttatattcggtcattagagggggaatggtcggacatacgttgcaggctattccgacatgggaacaatatgatgaaaaccggacaggtggatatggtggcttgtacggagacgttgtgaatttgactcatccgttaggtatggtggacgataatttaatgaagagatatagtgataatgtaaaaatatttgcaaatgcttatgtctccgtagaattaatgaaaggtctgaaatataagttaaacctgactccggatttccaattttatcgctataatagttatgaaggcctgtttgatttcgggctggcaaaacatgatataacagcggtgacggaacagcagacccgtacacgtaatattttggtcgaaaacttgctgacttttgatcgtacgttcggagaccataaggtgtcggctcttgtcggatatacatatcaggattcccggtatcgttatatgcaaggttccgggcaaggaatgccgactggaattactgaaatagatgccgcatctcaaggattggccgtaagtggtaattcaagccgcagcgtgttgacttccattttaggacgtgctttctattcttataagaatcgctatttgttgactgcgaccattcgccgtgatggttcttctaagttcggttccaattatcggtatggtaatttcccatcggtatctgttggttggaatattgcagaagaggattttgtaaagaatagcgtatcttggttggatcagttgaagttgagaggcggatatggggtgctaggtaatcaggaaattgataactatcaatatgtgtctgttgttacgaccggcattaattatccggatggaaagagcggactgatacaaggtgctttcccaaaaacgtttgccaatccggatatcaaatgggaagaaacggcgatgacgaatgtcggtattgactttatggccctgcgtaatcgtttgactttgactgccgattggtatgtaaagaatacgaaagatatcttgttgaatgtgcctattcctatttctacgggaggtgctaatgatccgattcgtaatgcaggtaagatccgtaatcaaggatttgaatttaatttgggatggaatgagtctttgaataaggatctgtcctatggtgtaagtttccttggaacttataataaaaacgaagtggtggaaatgggggcagaatcgcaggtaattaccggtgggacgattcatggaggaacttatacgagcagaacgttggccggttatcctataggtggtttttggttgattcctactgacggctattttaatagcacggaagaggtgcaagctcatcagaaagatggggttctgattcagccgagtgccgaacccggcgatattcgtttcaaggatacaaataatgacggaacgattaatgatgaggatcgtgtgtattgtggcagcccattcccgaaattcacctattcgatcaatggtaatattacgtataagaatgttgatttctcgattggtttccaaggcgttactggtaataaaatttataatgcgacgaaattggaattgacggatgtgacccgtggtacgaactatttggcaagtactttggattattggacgcctgaaaatcaaaatgcgtcctctcctcggctgatttggaccgacccgaataggaatgcccgttccgaatccgaccgttatttggagagcggttcttatttccgcttgagaaatcttcaggtaggttataccttgcctacggtttggtttcatggctttgttcagaaagctcgtgtgtatgtcaatgcggagaatctctttacgatctcctcttattcggggtatacgccggacgtgaattcttcagatgtatattctcgtggtttcgatgaatttatatatccttctaatcgtacatttatgtttggtttgaatgtcacattttaaataaaataacagtatgaaacgaatatatctatattttatatcttgtataatggttgttacaggtttgtgtacttcgtgcgacgctcagttggagcagatgaatccgaacaaggcgaccgaagatactttctggcagaccgaagctgattttgaattggctttgacttcatgctatactcctttgaaaaatgctctaaacgggggatattatggaactcgtggtgtaatgatgcgtattgctcgtgcggacgaagtggagtttagaaacgatatcagcgatgtctttcaagcctgttattttacaaatacaaatggaaattctctttcacaagggatgttttatcaattctataatgcattgtatagaacgaattcaatcatgcagaagctggaagagaagcaaggagaattcggagaggatttcgtcaataaggtgaaggcggagtgtttgtttattcgcgggttctatttgttccaattaggaaaagagtttaaaaatgcacctttgcgtctgacagcttctcagtctccttctacattccctttggaaaagtcttctcaggccgagatatggtcgcaggctgaacaggatttgcttactgcggcttctttgttgccggtgaagaatgatgttatcggaaaaccgacaaaaggtgcagcgtatgctgtgttgggtaaaatatatgtatatgaagaagactttgataaggcaattgaaatattggaacctttgacaaaatcaccttatacgtatcgtttggtagaggattttgcatggaattttgatgatgtacacgaaaacaatgaagagagtattttcgaattgttgatggagccggttggtggaacggatatttggggagatggagagaatatcaattcgactcaaacgaatacacgtccgaaagaatatgcggcaccggaagccagtggttggtatgaggcaaatccgaccccgcaaataatggattatttcttggaagaaaaagataaagatggaaattttgattatcgtgcacgttcatcggttgcttgggattatgaaggatgtatgtattatttgaagccttttcgggagaagtttgcagaagacagatggaatacatattggattttgaaatatcagaattggaatacggccgaatcggaggctgatccgcctatgtcttgcatcaatgaacgggcgatacggtatgcagatgtgcttcttctgcttgctgagtcttatttgcgtggaaagcaggatttgccgatggcaatcgggtatttgaatcagattcgtgaacgggctaatttgaacccctatagcggggcacagacgtatgaggctgtctttaatgatttggagcgtcagcgtgccatcgagttctttgtggaaggggaacgtttttacgatcttcgccgttggggattgttggaaaagcgtatgcagacttgtaatgaagttcggtataaacaattaatgactggtaaggtcggggatacgaatcgttattattattatcctataccatccaaggagttggagacaaatccgttatgtaccccgaatgaaggttggtgattgaccgttttttaataggtattattctaagggtcggttgtaatggtgcaaaacatgttatggctggcccttttcttcttctatttattaggactttctttttgagtcccgtatctttgataaaaataacgtatatcatgaaaatacaactattaatcataagtctgttgtttatgacaaatggcctctgtgcccgtggcttggacaaggcgtttcagctcctgccccaacctcaatctgtcgaactgcttccgggaaaaggaattatgtataccgatcttaaatttgtatcggccgcatcagacacacttgtccctatattgggagcgttgacggatgtccttccccgtgcaggacatgtgggaaagggattgttcttacaactttccgaatcgaacgtgcctgattcgcccgaaggatatgttttggaggtgaatgataaaggtgtgacagtcacggcccgcacggaagccggactgttttacggttgccaaacgttggagcagttgttggaagatagccgggattttgacctggaaattccgcagatgaagataactgattatccggctatcgcctaccgtgccgtccatcttgatacgaagcatcatctggaccggatggaatattattaccggatgatcgacaggttggcacgttataaagtgaatgcgattatctgggaactggaagataaactgcgctttactcgccgtccggaagtcgcagctccgaatgcgatcagcaagcaggagatgcaggcgctctgccggtatgcgaaggaacggaatgtcgagatctgcccacttgtgcaaggactcggccatgccggttttatattgaaacatcattgggaactgcgtgagaatccggacagcgattgggaattctgtccgtccgatccgcgtacatacgaggtgcagttcgatctttatctggatgcgcttgaagccatgccgtacgggaaatacctgcatgtcggtggggatgagatcacggcgatcggaatcgatgaccgttgcaaggctacaggcaagactgctttcgaattgcagatgatctggttgaagaatgtctgccagtttgctgtagaccatggtcgtattcctatattttgggatgatatgccgttaaaatatgccggtatatgggaacttgcgttaagcgataaatccgaagaggaagtggtgaaggtctggaacaccgacaaactggatgaggcgatcggtttgtttccgaaagaatgcgtgtatatgcgttggaaatatgaggatgcgacgacgcctgcccatcggcgccttttggaatggtatcatgataaggggttgaaggtgatgggggcgacggctgcttctgccggtgactcgccttttatgccgcgccggaatacccgttcggaatacgtgaaaggattcagccagttggttgccgacaatcaactggaaggaatattggcgactgcttgggatgacggttcgccgcatctggaaacggtatggagggggttcattgcacaaggagaattcggttggaatccgtcggcacgggatatcgaagcgtttaaaaaagcacatgcacagcgggaatatggttttcgcccggaggataaccggatggcctttctggatgaactggagaaggcggtctttttcttcgatggcgcgttggtgacttccggacgccgcaatccggcgtggggcacgactgctttcacattgatggagttgccggacaagacgaaaccgggggcatggagcgaactgtataaagataaaattgcacaggcaaagattgaagccggacgttacgagaagatagtccagggtatcagaacggcagaggcggaggcattacgcaatcgctatacgctgcaagtctatgaacagacgaataacctgcaaaactatccggtgcgcctcatcctggccttgaacgcttatgacacggcaaaggacgatgcagcccgggaagcggctttggagaaagtcgcagaggtgtgtagttatttcgatgtcatgcgctccaacctggaatcggtctattccgaaactcgcttcatggagcagcccgaaggtttcatctctgatctgaaccatcacaatcatctggcttctaaaacgaacaatagcgattggtggtattattacgagattccgatggtgaagaaagtccgcgcgtggatgaaatagtcgtacggaatgaccaaaaaaaataatttggacactttgtacgacttcaaacccttcaaaaaatgaattggacactttgtggcttacaaaacgtcccctcaaaataatttgaacactttgtacagcttcaaaacgttcaaaaaaatattttggcctcattgaagtacttcaatggcctcactggagatttcgggggcgttgtcgggcgacaataagaacaaacgatctgttctaatgatgcataaaaataaaatggtataaatcatcatttatgtgtacgtcattatattaatatatcacttaatgaaaaattataaatattcatatcatgaagaaaattacattcagtatcctgtttgtctggcttagcctgtccctgtgggcagcccggcagccggagttttcgacagccggttttttccgcctcgataatagcgggcgggaagtctattcgatgaatcctgcctggcgcttccataaaggtgcaatggaaggtgcggaaacaaaagaatttaatgataaagactggacggttgtctccctgccggacggtatcgaatatttgccgaccgaggcgagtggttgtatcaattaccaaggggaggtctggtatcgtaagcattttatgcccgatgccgctctgaaagggaagaaactttttctgcatttcgaggccattatgggcaaaagtaaggtgttcgtgaacggcaaactgttgacggagcatttcggcggttacctgcctgtcatagtcgatgtgacggatgtactggattggaatggcgataatgtgattgccgtctgggcggataacagcgacgatccttcctatcctcccggaaaggcgcaggatgtgttggactatacctatttcggcggcatctaccgggattgctggttgatcgcgcataacaatgtgtttatcaccgatccaaattatgaaaacgaggtagcaggaggcggcttgttcgtcgctttcggaaaggtttcggatgccttggcggaagttcagttaaagatacatgtgcgcaatgctacgaagaaccctttttccggccgggtggaatatatgctgttgcagccggatggcaccgaagtcgcccggctgagtgacaagatacaggtgaaggcgggtagggcaactactgtttccgaccggatgccggtgaagcagccgatgctttggaccccttcgacaccgaccttgtataacttgctggtgcgggtacttgataaggaaggaaatgtgatcgacggttaccgccgccgtatcggaatccgcagcattgagtttaaagggaaagacggcttcttcctgaatggcagaccgtacggcaaaccgttgatcggagctaaccgccaccaggattttgcggttgtcggaaacgctgtcgcaaatagtattcattggcgggatgccaagaaactgaaagatgtcgggatggagatcatccgtaatgctcactgtccgcaagatccggcttttatggacgcctgcgatgagttgggcttgttcgtgatcgtcaatacgcccggctggcagttctggaatgacgcgcccgaatttgcacagcgtgtgtatagcgatatccgcaatgtcgtgcgccgcgaccgcaaccacccttcggtctggctgtgggaaccgatcctgaacgagacttggtatccggctgatttcgccaagaacacccgtgatatcgtggatgccgaatatccgtatccttattgttatagcggaagtgacagcgaagcacgcgggcatgagaatttcccggtctattttgcccatcccgccaatatgcaggatgcttcgaaagagatcgatccgacgaagacctactttacccgcgaatggggcgacaatgtggatgattggagctcacacaattcgccgagtcgtgtagcccgtaactggggagaacagccgatgcgcgtacaggcacagcattatgcctgcccttattatccggtgaccagctacgatgttctttataagcagtctccgcagcatgtcggcggttgtctctggcattcgttcgaccatcagcgcggttaccatcctgatcctttctatggtggtttgatggatgtcttccgccagccgaaatattcatattatatgtttatggcgcaacgtccggcagtcaagaatgaccggaatgccggaagcgggccgatggtgtatatcgcccatgagatgacgcctttctccggcaaggatgtaacggtctattccaattgtgacgaggttcgtctcacgttcaacaagggtggaaagacttatacttataagaaagacaagaatcgtcccggaatgccttctccggttatcactttcccggatgtctatgattttatggtggacaaggctttttcaagaactcaaaaacaagatgatgtctatctgcttgccgagggtttgatcgacggcaaggtcgttgctacacataaagtcgtacctgcccgtcgccccgaaaaaatcctgttgtggatggataatgaaggcacggacctgaaagccgatggttccgatttcgttacggtagtggcagctgttgctgataagaatgggaatatcaaacggctgaataactataatatctgtttttctattgaaggtgaaggacgtttgttaggtggtccaggagtactggcaaatccggttcccgtaaaatggggaactgcgcctgtcttggttcagtctaccttgaaaccgggtaagatacggattacggcgagtgtcctgttcgaaggtttgcaaatgccgataagtggtgaacttgagttcgaatcgaagccgtctgttttcccgttggtctatgatgctgcggatgctgcccgcatcccgcttggtagtgcttcggccggacagaacaccgcttccaaaacggatgcagaacgggaagtggaacgtctgcgcaaggagttgaacaccttgaaacttaaagaggtggaacggcagcagtcggagtttggtgaaaaagagtagttataaaatgcagaggtacggagttggatgtttaaaatgaacaggattctctgtacctttgcgttgaaaagaactatttttgcaaaaaaataaaaataggttgataataatgaagcaaggattattcacattaggactgtcagtggctctgtcgattatggcaggttgccggtcgcaacaggaagggtggaaattggtttgggaggaaaacttcgaccaggaggatcatttcgatgaggcttcgtggagtaagataccgcgtggaaagtcagactggaataattatatgtcggacttcgattcctgctatactatgcgcgatggcaatttggttttgcgtggattagtcaattacagtttgccggctgacacggctccttttatcacggggggcgtttatacgaagggcaaggtcggtttttccgacgggcgcctggatatccgtgccaagttgtatggggcaactggcgcatggccagcattctggttgttgccagaaaatgagggttggccgaatggtggcgagatcgacatcatggaacgcttgaataatgatacgattgcttatcagaccgttcattctgcctatacgtacactttgggaatcaaagataacccgaagcagggcggtatcggttttatcaaccgcgatgattataatgtctatagtgtagaaatgtatcaggacagtctcgttttctttatcaacgaaacccgcaccttcgcttatcctcgcatcgagacggacaaggaaggccagttcccgttcacagacaaaaagttttatctgttgctcgacatgcagttaggcggaagctgggtaggagcagtcgattcatcggatctgcctgtcgagatggagatcgactgggtgcgtttctatcagaagaagaaatgaaaaggggagggggtattcggataaatcggacaacttggagatgatcgccttttttagcgattggagttcattacttaatatccaccagataacatcaatatcaatttcaaaataatgatggaccacaatgtcccgcagacctttaattctttatcatgacacatcttagagtgtttccgtttgaaacaaaagcataaatttgattagtacaaacaaaacttttagcttataaactgtatgaatagtatattttactgttaaacatactatctttgacgcttgttattaagttaaatagttacagtcatgttagatgtacagtctatccggaaggatttcccgattctggatcataagatatacgataagccgcttatttacttcgacaacggagcgacaacccagaagccacgctgtgtggtggaaaagatcgagagtggctattataatgtgaatgccaatattcaccgcggcgttcatttcctgagccaggcggcgacggaagcgcatgaggatgcacgcaagaccgtgcagcaattcctgaatgcccgctcttccaacgagattattttcacgcgtgggacgacagaggcgatcaacctgattgcttccagctttaccgacgaatgtatgtcggccggtgacgaagtgatcgtttcggtgatggaacaccattccaatatcgttccctggcagatacaggctgcccgtaaagggatcacgttgaaagtgattccgatgaatgaaaaaggcgagttgtgcatggacacgttccgtagtcttttttcagaacggacaaaacttgtctcggttacacatgtgtcgaatgtgctcggtacgatcaatccggtaaaggagatcaccgaagaagcccataatcacgaggttccggtactgattgacggagcgcaagccgttccccatctgaaagtggatgtgcaggatttggatgccgagttctatgtgttctctggtcataagatttacggtcctaccggtatcggtgtcctgtatggcaaggaagaatggctggacaagttgcctccgtaccagggaggaggggagatgattgcttccgtgtcttttgaaaagacgactttcaacgaattgcctttcaagttcgaggccggaacgcctgattatataggaagtacggctttggcggaagccttgcgctatgttggtcgtttgggaatggacaatattgcggcctatgaagacgagttgcttcgttatgcgaccgataagctgaatgcgatcgacggtatgcgcattttcggacaggcggcgcataaaggggcggtactttcttttctggtaggcaatatccatcattatgatatggggatgttgctggaccgtttgggtattgcagtccgtaccggacatcattgtgcccagccgttgatgcaggatttaggtatcgaggggacggttcgagcctctttctcgttctataatacaaaagaagaaatagatgcttttgccgccggtatcgaacgggtgcggaagatgttctgaatatattgaatggagtaatagtgatgttgtattacctgaagaaatatccgatttccctgacgattatcgcagtggtgatctatctctctttctttaaaccgccttctctggaggtcggaaaaatcgtggggatagacaaagtggctcatctctgtatgtatgccggcttgtccggtatgctgtggatcgagttcctgcgcaaccattgcaaatacgacgatgtgttgtggcatgcttggatcggagccgtcctgtgcccggtcttgatgagcggagcaatcgaacttttgcaggaatattgtacgacataccgtggtggcgactggttcgatttccttgcgaatatctgcggtgttactctcgctacgctgttttcttacttcgtcctccgtccctggataatgaagagaaaggctggtattcattagtttatgtatttatccatttgttgtgggattaccgacaagatcccgccatttgatgaatttgatagaagaagttgattaaccatgttattatcctacttagaagcaaatcgtatagaggccggctgtgatgaggccggccgtggatgtttggcgggttcggtgtatgccgctgcggttatcttaccgccggactttcataatgaagatttaaatgacagcaagcaattgagcgaaaagaaacgttatgcactccgtccgattatcgagcgggaggcgattgcttgggctgttggtatcgttacgcctgaagaaatcgacaggatcaatatcctgaaagcctctttccttgccatgcaccgggccattgaccagttgaaggtcaagccggaacatttgttgatcgacgggaaccgctttacgccttatcccggtctcaaacatacgactgtcgtaaaaggagacggcaaatatctaagcattgccgccgcttccatcctggcgaaaacctatcgtgacgattatatggacagtctcgaccgggaatatcccgcctatcattggaaggaaaacaaaggctatcccacaaaagcccatcgtgaagccatccgggaatgcgggataactccttatcatcgcaagacatttactttgctgccggaacagttggagttgaagttctgacggaatttttatttttgtttctgtttgatcagcatgatgaccggattggaatcttctttcaattcggaggcgatttctttcagtttaccttttagccgatctctctcataatcttgaatgagatctgccgcatctaaatgttgccaggaaggaatttcgccatttatcggtcttcttgaatttaagtagactgtttcttcgtcggtataatctccattatagactttgcttctgaagaaagccttttctcgtttgtcgtacaataaattagttgttgaaaactctattgtcttttcgattgcatccataaaatagtaacggtcggtaaagaggcttggcaaaagaattacttccggggtcatggataggatagaagggactcttgcgataagtggtgtcaaggtatgatccggcaaatactgatacaaggtgtcggctgaatactccgtcaaaatataactgttataataaggcatgatcggatgtttgcattgaggagaataaacaaagtactgcccctctacagttttatcttcgaccctgacatagatgcttttcttctctttaaaagggattgtgatttcttgggtgatgctgccatcctgttttgatatgagcatgaacgactgtccggtattcctcggaaaatcatcatggcaaattaaattatctttgtcaaaattgtacatttcaaaaagcgataactctttttgaatcggtaggtcccgtttgaaatttccttccaggtcatagacttgtattttctttgcaaaactgttgttgacaaatatttctcttttttcttcatctaaaatgattcttgaataagaactgtattcttcattgccttggcctttccggtttattttttttaaggcttttccttttcggtcgaagataaaaatattaccgtcgctattgaaatttgtcgcgacgatgacatccttgccgactccccataaactccccatacaaagaaattcatctgttgtctccaacgggatatactctacatccataaaatcttggagaatcaattctttgtaaggatattttgctgtgacatctaccgtgcttatttcatttgccggttggttgttctttccacatccgatcatgacggacaggaacatgattaaaatagaatgtacatttttcatatttgtagatttaagaaatttataagattttagagagggaaatgtttttattttgttgaatagcaatctactattattttgcaaatctacttagattaagtagagtagaggtatctgtctagttaaacgttgttaatgggcgaaggatttgagagggaggctgtccgaaaatctcctaaagtagtgtagggcaaccgcaccaaaattcggaaatcgtatgaactataccaaagaaaaaacaggaccttatcatataagtttttcccatttcctctgtcactgtgtcactgatctcttttaccagttgatattcaacttgtttcgttagtgatacatgcccttttctctatcacaactatatcactgacacattgttctgtctcgtcctgattttggttgactgtgtattaaaaaaatcctgttataggttgtctataaatgtaaaaaaacagacaatcctttcttaatcctaaaataagttaccttatcctgtttcactacaggacagggggcttttcacagccaaactcatcggccggggagcgcccaagcggcaaggggcagggccacctgtcccgacgagcgtttccggtctctgttctattttgttgcaaatatatcagtttaatcctgttcataaaagaatagcttgtttacgtttataaatagttttccattttctttttaaaggccccttcttcgcatgcgcctcttcaggtgtcaacatttccacactactgtgagggcgccgggtgttataaatatcgatcactttcctcactatatcccgagcctggccgagcgttgttatcatttctttattcaaccattcttcttttaatattccattgacacgttcagctattgcattctctctgggatctccgttttctgtcatacttatacgacatttaatgccttgtaaaattgagatataatctttgctacaatattgtactcctctatccgaatgatggatcagatcgcttcccgggggaagtgtttccaaggccatattcaacgcttttatcggaccggacatctccagggaatcctccagggcccaaccgacaatcttacgggagtatgcatctgtgagcaaactcaaataatagaatcttccttcgacattgcggacataagtgatatcagctacatataactgattggctgatagtggatcataatcttttatcagatttggatacttatgaaaacggttccatgacagagttgttaccggccgataaaccctggaatgtctgatcaacaaaccattgtcgcgtagcaagtcaaaaaacttatcgcgccctatatccaaatcaggatgtatcttggtttttaggatatgatacaacttacgaccacctaaaaccggttggtcctgacgcaggctgtttaccattttaaggattatttcatcacacaacaattccgattgtaactgtttttctctcttataataggcttgcttgctatacccaaacaacgaacaacaatcagggatacttatttccggctgattgtcatgaagccttttcactgcttggtgccagagttttttcggatatcgatgttatagtgttcattggctagttctattaggatttccatcgcacggcgatgagcttgctcatgcttcagttccttctctttatcctttaactccaactctttttgtttgagggcgcgttccagttctttgatccgtttggaaagatccgattcgttttctgtcatttttattgatcgctttttgagtttcagtggttttattgacactgatgattgtctttttgcctcaaatttacgaatccaatgcgatattaccgtagggtcgcttatggaatatttaaaggcgatctctttacggcttactcctaagcgatattcacctatagctgctaggcgaatctccaaaggataaggttcacccttgcgacgagtcaatgacttctcttttttcatctttgttgacttttatgaagtcaacctatttcaggacgagacactcgatcattttatgtaaaagatggctgtgaaataggtaaaaccaagtgctttttattgtccggcacggtactttagttaccggacatccccatgttgccatcctttacatccgggtgtagagagctggtacatccgggtgttaaggagggtaacatgggggtgtttacggaattatgtgcttgtctttgctaaaaaaagaaagagctttttgattttaaacataggtggtttggagatcacccttgctgttccttagtacggaatgccagcgcgtacatgcgcatctgcttgaccattgccaccaggccgttcgagcgggtagggctgaggtgctctttcaagccgatcttttcaatgaagtaaagatcggcatccagtatttcctgcggggtgtggtcggacaggatgctgatcagcaaagagacgatccctttgacgataaccgcatcactctcgcctttaaacaagatcttgccatccacataatctgcctgcagccaaacacggctctggcaaccttcgatcaggttgctttccgttttatacttttcctccaaagggggaagcgagttacccaagtctatcagtaacgcatacttgtccatccagtcgtcgaagtctgcaaactcttcgatgacgttgttttgaagttcattgattgtcatttctgttctatcttttatctgttatatacaacttcgagtactgtctggccgacggctttcagtacgtttttgtctatattgctcatgttgtcgttctgcgtatgccaatggtcacggaaacctttgtccgagttcggatcatagttgatgatatccaggcaaggaataccggtttcttcgatgactgcttcatggtcgtctgtcacgcctccgccgtttgcgttgatgaaatatttgccgtatcctaagttacgggccgcttcccatacttcatccacataacgggcggcatatttcatcgaaatatattctttatagaagaccgcatctttggcgccgaccatgtcgagtagaataccgaattcggctttgtagcccggtttgtgcgggttcttcccccagaagcgactgccgaggcaccaggtgtcgctcgtgtcgttgtacctgtctttagcaaattcgggtgtcccgtagtcttcggcatcaaagaagatgatgtctacccctgtttcgggagccttcattcctatttgtcgggcgatttccaacaaggcgcctacaccgcttgcaccgtcatcagccccatccaacggtttcttatggttggcagggtcgggatcgtggtctgaataaggacgcgtgtcccaatgggcgaaaagcaggatgcgtttgtctttatcgggattgaaggaaccgatgatgttacgtgattccaatggggttccgtcgtaagctgtaagtgtagcttcctgttcgtatacttgtgctccgaaacgtttcagctcggatgctaggtaatcgccacaagccttatgagctggcgtgttcgggacgcggtaaccgaatgatacttgtttttcgacataagcataagcactgtccgcatcaaacaatggggcggttgttgctggagctttctttacttccgttacgggaactgttgtctcgctggttcctttctgaccgcatgcgaacagggtcatggagaataataataaaatcagtttagtcatatcttgtcgtttataaggagttatcgggagcggattgcgctttgttcatcacgcgcaacagattacctccccatattttagcaatatcattttctgtatatccttcttttagaagacgcattgtgatgtttatcagttcattgctcgcccggcagccaatcagttcgccgtcaccgtcaaagtcggaacctatcccgacatggttgatcccgatcaggtccacgatgtggtcgatatgacggatcgcatcgctcagggacgctttttcggcatcttcgttgatgaatcctttgtagaggcatatctgtgcgacacctccctgttcggcgagcgccttcagttgttcgtccgtcaggttgcgcggatggttgcaaagcgcgcgggcagaagaatgggaggcgatgatcgggtaggtgcttgtttcaagtgcgtcataaaaggtactttcggcggcatgcgagatatcgaccaatacccctgtctcattcattttgcggacgacttctttcccgaaaggactgaggccgttccattccgcgtctcctcttgctgagtcgcatatgtcgttgctcccgttgtggcagagagtgatataggaaactcccattttccggaaacgggtgatattctcgatgtccttgcctatcgcatatccgttttccacgcctaacatgatcgctttctttccggcagctttcagcacgtggacttcctgcggcgtgtaggcgatgcacatgcgtgtacggttcaactccatttgccggtgtatttcctgcaggcggttcatggcgaagtccgtcgctttcagcagtgaagcgtcgtctctcggtccctgcggaatgtaggcgaccatgatcgtcgcgtcaatcagcccctcttccatgaaagggaggtttaccttaccgccttctttcaacccgatgttgaattcacccggaaagatcatcggggtgtcggtatgggagtcgagcgtcacgttcctgtggtggatgtatttggcttttttgaacaggcgggacgattcgacatgatgcttgaaaagtttcaacatctgttcatcgtcattggcagccatcgcttcggggtgccactggacactgaatatttctttttccggatgctccatcgcttcgttgatcccgtcgggagctgtcgccgtagtgataaattcgggagccggctctttgattgcctggtgatgaaaagagttgaccaaaagttctttttcactgtccagcatggtgcggagcttagaggggccttcgttcagtgtgacggaatgggaagcctgttcgcgggaaagcgtctggctgtgtttcagtagcttttgattgtgttgggtatggatatcctggtatacgttgccgccaaatgcgacgttcagtatctggtggccacggcatattcccatgaccggcaactggcggttggtcgccaagcggagcagtatcaggtcgtattcatcccgataggtatctacatcctgcaaggcgggaattggttcttcctgcatgtaaagcgggttgatatcgccaccaccgctcatgaccagcccgtccaacccgttcactattgccgtcaacgcttcgatatccgtaatgaccgggatcagaaccggagcacctccagctttcagtaccgcctgtacataggtttctgctatgcaggaaagtccgtctttccgattggcggatattcctatacggggaggttgaagattttcttttttcggaatataatgatctacttccctgtagatggcctctaaattcggacgacggagcttcatgtatttatgatttatgatttataatttctgaattatgatttataatttatgatttatgatttattatcggtgcataaatcataaattataaatcataaatctttacgcatcgatgtttgcgtacgttgcattttcttcgatgaattcgcggcgcgggccgacatcttcacccatcaacatggcgaatatctggtcagcttcggcagcactgtcgatcgtgatctgtttcagcgtacggttttccgggttcatggtcgtatcccacaactggtggtcgttcatttctcccaaacctttgtatcgctgtgtgtggatctggttttcgttaccgccgccatatttgtcgatgaatgcttgacgttgttggtcagtccagcaatattcttccactttgcctttcttgcataggtagagaggaggagtggccagatagacatatccgttttcgatcagcgcacgcatacggcggaagaagaaagtaagaatcagggtggcaatgtggcttccgtccacatcggcatcggtcatgataatcactttgtggtagcgcagtttgctcaggtttaattctttcggatcttcttcggtaccgatggtgacacccattgcgcggaagatattctggatttcttcgctttcgaataccttgtggtccatcgccttttcgacgtttaggatcttaccgcggagcggcaggatggcctggaagttacggtcgcgtccctgcttggctgtaccgcctgcagagtctccttcgacgaggaacagctcgcaaagtgcggcgtcctttgaagaacagtcggccagcttgccgggaagaccgccgcctgtcatcggtgatttgcgctgtaccagttcgcgagctttgcgggcagcctggcgtgcttgggctgcaaggatcactttgtcgacgattatcttggcttccttaggatgttcttccaggtagtagcccaatgcttcgccgatagcctggtctacggcaccggttacttcgttgtttcccaacttcgtcttggtctgcccttcgaactgtggctctgccactttaatagagatgaccgctgtcagaccttcgcggaagtcgtcgccggagatttcaacctttgctttttcaagcagcttggagtcgtcggcatatttttttagtgtacgggtcaaaccgcggcggaaaccggccaggtgagtacctccttctatggtgttgatatcgtttacatacgaaaatacgctttcgttgaatgaagtgttgtaagtcatggcgacttcgaccggaataccctgcttttccgtaacgatgtggatcacatccgggatcagttgctctttggagcggtcgatgtagcgaacgaattctttcaacccttcttccgaacggaatatttcagatttatagctgccgtcttcctttacgacgcgtttatctgtcaggctaagtgtgatgcctgcattcaggaatgccagctcgcgcagacgtgcagctaaaatctcgtacttatactcggtcacggagaagatacttccgtccggtttgaacatgatggttgtaccggtcacatctgtctcgccgatcacttcgatagaatgaagtggcttaccacaggagaattcctgcatgtggacttttccatcgcggcggacttctgctctcaggtaagtggaaagtgcgtttacacaggatacacctacgccgtgcaaacctcctgaaaccttgtaagagcctttgtcgaatttacctcctgcatggagcacggtcaatacgacttcaagcgctgacacgccttctttctcatgaatatctaccggaataccacggccatcgtctgtaacagagatggagttatcttcgtttatcactacgtcaacttgggtacaaaatccggccagtgcttcgtcaatagagttgtcaacaacttcgtatactaaatggtggagacctttctcgctggtatcgccaatatacatggacggtctcttacgcactgcctctaacccttcaagtacctgaatactatccgcagagtactctgtggaagtattcttaatttcttcactcatgagtctttatcgtttaaaatctgtaattatctgtctgtctaaaaaaagctaacaaatatagtgaaaataattaacttagaaggtatagggagtgtgaaaatagtcaaacggaggtgtataacaaaaaaagagacaaagtcaaactttgtctctttaaaaaaggtagcccgtgggggaatcgaacccccctttcaagaatgaaaatcttgcgtcctaaccgatagacgaacgggccatcaggtttaaaaaagccgggctaaccagtccggctttatactatataaagtataataccttattttgcaagtgtgttgacgtgcttcgctaatttggatttcaagttgcctgccttattcttgtgaataatgtgttttttagcaagcttatccaacatagagcacaccttcgggaacagaacctgagcttcgttcttatcttcagtagcacgcaaaactctcattgcatttcttgcagtcttagcataatatctattatgcagacgttttgcgttggtctgtctgattctcttaattgatgacttgtgatttgccatttcttagctattctctttatttattctttaatcctgtttattgtagcccgtgggggaatcgaacccccctttcaagaatgaaaatcttgcgtcctaaccgatagacgaacgggccatcatctcaaagtttttacttttagctctctgggattgttgatttcccgattgcgagtgcaaagatagatgttctctttaaactgacaaaatatttgaaagaaaaaagttttgggttagtcgtatttaacatctatttggaactcatatcctgtaggtgtatctctaaagcattgacggaaatatttatttcccagatacatacgcatagcgaagctgccaatagaagcaatcctattccaaatatccaggcggctatgatttgccatgagatatagatgaagaacatcgagaccacgcaaaagagtaggcttagcagacctaatatctgcatggagcgtgtcaggtataaccgtttcctaagattggctatctgggcgatgtctttcgggtcgtgtgtctgttgatgcttttctttcaatgtgcgtacgaggctcgcatacgaaataaaacggtttgtataggccaataggataagtgaaactgctgaaaatagcagtgatggggttgtgagcgtgagttcttgcatgtttatatgttctttataatttagtagtttgttattcaataaaacaaggctgagaaggaaaatgttgtaactttgttttccaaatttcagtgatatgttgtgtaaaacgcgtgggattgtcctgcattccattccatataatgataagtactccattatatatatgtacacggaggcttttggacgtgcttcttatctggttgcccgttcccgtggaaagaaatcttctgtctcgaaagcgttgttcatgcctctttcggtagtggagatggaggttgagcatctgaataagcgggatttgcatcgtatccgtgaaacgaaactctgctatccgttgacggaagtgttttgtaatccggtgaaaaatatacttgcgcttttcctttccgagatccttttccgcgtggtgaaggagacagagccggattcgcgccttttcgagtatttgttcgagtcgatacaattgttagagctttcggataagggggtggcgaattttcatctggtctttttactgcgactcttacattatctggggatatatccgaacgtcgaatcatatgtggcaggttcttgcttcgatatgctgaatggcgtgtttgtcgatcgtataccgatgcatcgccattatctgaaccggcaggagagtgtggttttggcccggttgctgaagatcagcttcgagaatatgtcgttgtattctttttcccggcaggatcgtgtgagtgtcataaaccgtattcttgaatattatcgcctgcatttgccggattttcccgaaataaagtccttatccgtcatgcaaagtctgttcgattagcatattgctcctttaaatacttgccagtttgcggaaaagattatacttttgccgcacttattataaaaatggctctgtagttcaacggatagaatagaagtttcctaaactttagatccgagttcgattctcggcggagctacaataaaaaaggcaatcgttacgattgccttttttattaccagtggaatgcctcgaaggtcacccggtctccgtttaggaaacactttaaatattcgttacctattcgaacatcctcgtaataatcagtcccgtttgcatattcgacatagaaagaatcgaaatattcgtctttccagtcccaataaaaacttgttttcaattcgtcagtcataccgttaggataatagataattgtaaaatcttctcccgtatgatcgttatagaagtcgagccgttgttcgcattcgtaccctttgttattggtataaaaatcaacccaggtattattgcataatgcatcggtcgcccagccgtaatcatcataatacggatcatcctcacaactgttgaacagacagagtgcggacagcagaaataataaaccgagtatattcttcttaatcatgattccaaatattaatcattcaatgacaaagatatgaattaaaacgatatagaggaatgtttgtgcggccgtattgttgatggaaagcatgtgtttatacaaattttattcgtaatcaggcaattcaatatcggttgtctcttcccatttcccattgttgtagatgctgatctggaatgtgtcgtcggattcggaacggctgtagaggcggcctttataacggatgattttgtttttttccggaatgatattgtcgatttgccgttcccggatcggttcgtcgtttttggcgatggccgaaaggcggacggctattttattgtcggtgggaggtatgaaagtataaaaagaatgtactttgtttacttctccgatctcattattcttgaatgtataggagaggatttgcttatccggggtttttatcccctgaccggtggcgatgtccagctgattggatattccgtcgatctccatatcgaactgtttcagtatgtcggaaaccgaatcggtcgccatgaactcaatacggctgacgatacgttgaagagagacatctttgttggtgatttctgcaacatcgatgtttagggatatcatttcgtagaatgtatccgagatgctgtcgaaagaaaaagttgaaccggataatacagcgttttttgaattgtgggctaaaaagtagaatttgtagtcgccttgtggcaaactgtcatatatgcaactgaaatccgcatccagatcggtgggattgtaagtgaactgcttgtgcttgattaatgcaggagtatcttcgtttttaaataccacatattcgatggtggaacatatttcgttcaattcggcgtcgctctctccagctttcgaagccgttggttccggaatcacgttattcggtatgctgcgggtgggaaaagacactatctctttttccatctgaatgctgaattgaatggggaaaaactttgtttgcgggatgactttttcgagtgaagaactgtcgcaacctgtcaagtagagtacgcagccaagtgcaaaaaacactttctttctcatagttaagttttttagttgtttataatgttacaaaggaaagataaataatcagaaatgaaaaatatttgtagatgaatttaaaaagatattttatatttgtcgaacagacacaatgtattaaccttaaaaagaacgaaaaacatggcacgtcctgtaacattatgtacattgcagtggggagacttaccgctggatgttatttgtgaaaaagcaaaatcatttggttttgacggtgttgaattgggattaccatctcatttggatgttcggcagacagatccggaatattatcggaatatcaaggtgacactcgataagtacggtttgcaactgttttgtatttcgaatcatctggtcggccaggcgatatgtgataatatcgatcaacggcataaatccgtattgcctgattatatctggggcgatggcgatcctgatggagtgcacctgcgggcggtcgaaaatatgattcaggcagcccatgccgctagaatgctgggagtcgacaccgtagttggttttacgggaagttcgatctggcaatggctctactcctttcctcccgttaccgacgagatggtgaatgaagggtatgctgattttgcccgacgttttattccgattttagacgaatatcaaaagttaggtgtccgtttcgctctcgaagtacatccgaccgagatcgcgttcgatacttattctgcccgtaaggctcttgaagcgatcgattatcatccggctttcggttttaattacgatccgagccatttggggtatcagggagtggattatgtagacttcattaaccagttcccggatcgtattttccatgtccacatgaaagatgtgtattggagcgatactccgaaacagatcggcgtgttcggcggccattcaacttttggcgatgcccgccgcttctggaatttccgtagcttaggacgtggaaagatccggtttgaagaaattatccgtgctttgaacgatatcggctatcaaggtccgctctcggtggagtgggaagatagcggcatggatcgtgaacatggagcacgcgagtcttgcgcttttgtcaaacaggtggatttcctgccgtcggcacatgccttcgatgcctgttttgaaagataagaggatgtaggtaagaagggataagtgcggcaaaggtttatcccttcttttttatttagtccatttcatacatgtccggttcctcgctcctgcttttgtcttttttcttgttcatattgccgaagttgtaggtcagggtaaaaccaactcttctgccaccacgccagttctcggaatcctgccagaaaccgtctccggatgtaatggtgcggaatctgcgggagtccagcaagtcgcgtgcattgatacttaacgtcaacttgtcttttaagaaagatttgcgcaatccaaggtcgactgagtagttcggttcgcggtatccttgtgccatcaagcgcttggaattatagttgcctgtgccctgtagggaaacaccccaaggaagactgacattggcaatcatgcgtacgttccagttgaagctttcatcctcctctccagtgacaggagcttccgctccttcgggcagatagctgaaaccgtctaatttggagtagtagaggtttacggtcgttgtcaggctaaggatgctgaataaattgttttttccaacgatttccagaccgctgttttgctggcgggctacgttttcactggtcgtgtacattacattgtctgccgtgttcaagaaacgaatgcgctggatcacgtcatctgtcgagcgatagtagccggataatgatagggtatggccggattcccaggtcttgatataattcaattcgaaagaatgggaatattcaggtgtcagttccgggttaccgaaagaaatgttggaggcatcggaaatattgcggaatgaatttagctgtccaccccaaggacgacgcaggcgacgggtatagtttacttgtatttcattgtttttagggagggcataggagataaaggcacttggaaacaacttgaaatagtctttctcgaaagtttccgacggcttgccgttaaattcctggtcgaagtccagcgagcgggtatccacacgccaatattctccacgtaggccggcttggtagctcagattgttccacttgcctccatacgtcatgtacaaggcatgcacatcctggttatatagaaagcggttgtaaagtgcctggtcttgttcgatgtcggtagcggttgttccggtataggtatccacagggctggattctctttggaatgtccctttataacctgcctcgatccggctcgcgtcggatattttgtttgtgtagtcggcctgaacttcccagcttttgtttttgatgttgttttcctgagtttgatattcctgtttgtcggttaagtcagtgtccgtatatcgggttgattgttcgtaaatgcttagtccgtcgtttctccattggttattgctgacggttaagtctatattgctgttttccgagaatttgtgtaagtaattcaattccaggttatacattttcatgtccgagtttccgtctgttgtacggtcgctggtgtaaaccgtattcttttgcttgtctgtcgaaatgtaatggatcgattcgttgttgtcgccccctccggtcatgccggtcatgttgaatgctaggtcgtcgcttttggtaatgtgccaggttgccccgatacgtccgaaccagttgttgtgttgtcgtttggagttgttggtctggtcgagaaaactattgttggctgtattttcacgacttgtgattccaccgcctttcatttcccggttccgatagctcagattggcgtacgcgtctactttgctactgctgtagttgatgtttccacttgcctgataacctccgtccgtatcggctccggcttttacgctgccgtagtaaccgggtttccggtcatcctttaaaataatgttgataatcccggctgttccctccgggctgtatttggcagagggattggtaatgacttccacttgtttgatatcttctgccggcatcatttccagtatgtccgcctggttgtctgctgtcagtcccgatgcttttccgttgatccagactgttacgctggaatttccacgcaatgaaacagatccttcgttatcgacttccacggatgggatattggcaagcaaatcactggccgatcccccttcggatgcgatatcttgtgttgcgtcgaaaacttttctatcgagctcgaatctcatttggggcttttttgctacgatttctacttctcccaattggttggcatcttcttccagggtgagttctccaagattaagagtttgagaattgttgctgattgttatatttttagaaatttccgcgtagccgatataggaataagtaactatatattcccccttcttcagtcctccgatactgtaatttccgtcacttctggtaacggctccctgcaatattttgtccgaaccttttgctttaacctggacggttacaaattcgagtggtccccctaattcgccgtccattacaatacctttaatccttccgtccgtttcattaccttttatatccggagccaaacacaaaagcataccggttaaaagtaagctcatcttttttgtcatcatcttccaaatctgtcttttacattttacaaaacgatttatatgactgctatcatacaaaaaggtttatttgaaaaatcaaaaattaggtaaaatccttttgtatggtatgatgatggatcgggtatgccatctcttttccttaccttttaaaccctgtcaatgatgaagtttttttacaggctctttctgctgagtggaaggcgggaagttgaagaaagaagaaacaagctgttttgtgatacatgaatgactttttattatctaatacctgttagagtttgttctaccttttattccatgataaaaagcaatcaagatgaagtattttttcattcatcttatcccgatgtcccgttacgcaattctataaataggaattggataaaaaactccttcttgcttaatactatgactgaaaaatatgatcatttcttttatgaagaaattaagggggaatatattgatttccatgaacaatggtggggaactgttcgtttgcaacgaacgatgatgtggttgccttaggtttttcaaaagtttcggtgccaatatggtgtaggttttatcatagtcctgcaagaactgcggtgatttggagtgattatttaatatataagttgtagaatcttggttatatctgtatgatacaaagaatctaatttactttttatcgaattgattaaattattgtgtgtttttttatagaaagttgtggatatttgcctatatttgagccgcagttcttgcagaacttaatgtaaatataaagaatgtataatcgtgtaaaattataagtctttgtgttttaggatctttaggctatttttttattataaaataaaaatgttaacttatgaatttaatctcaattagaaaaaagcggagacctgcaattgctttattgctttgtactggtttgttgggggcttgtcctccggatgccgttgctgatgcgggagatagattgcccgtccctgaaatccaacaaagtaagtcgcctgttaaacgtacgttagtcggtactgttacggatgcctctaccggtgaaacactgatcggtgtaaatgttatcattaaaggtactactcaaggtacagtgactgatcttgacggaaagttttccattgaagtaacaggtaaagatgaaatcgaaatctcttatatcggttataagacacaaacgatcgaagtgggtgatttaggcgtcttgaacgttaagatggagggggataatgaagttttggacgaagtcgttgttgttggtgccggtactcagaagaaagtatctattaccggcgcgattacagctacagaaggtatacagctgaaagctccgacatcttcattgaccagctcactggctggtaaactggctggtgtcatttctacgaacagcagtggtgagccgggttctacttctgcgttctatatccgtggcatcaatacgtttggtggtgtggcaactccattgattttgttggatggcgtggaaatatcgtctggggacttgaaccgtattccggcagaaagtatcgaaagtttttcggttttgaaggatgcttcggcgacggcaatctatggtaaccgtggtgcgaatggcgtcatgcttgttacaaccaaacatgggaaggaaaatacaaaagcaacggtcaacgtgtcggtcgaggcttcttatttccagccgatgaatacaccggagtttgctgatggaccgacattcatgcgcacctataacgaggcgcagcaggcgcgtagcgcgacagtaattacaccacgttattcggatgagatcattgcggcgacagaaagtggtatcaatccgtatgtctatccgaatgtagattggtatgacatgattttccgtagtggaaattataatcaacgtgctaatgtgaacgtatcgggtggtgcgtcgcgtgttacttattatatgagtttgcaggcaaaccatgatacaggtttgctcaatgctgcggacaattcagctttcaatccgaacattaaccattgggagtacaattttcaaaataacatcagttataagttgacgaatacgacgactgtcaatcttcgtatgatggcgcaaatcggtagccaaaagggaccgaataataagactactgatatctacaaaaaggtgatgtatgccaatcctgtctctttccccgcttatttccctggcgaagcagatcatatttattatggtaatgccgaaattaaagctggggcttacggagaaaacccttaccaatacatgatgggatcgtttagggaagacaacttcaatacgctgaatacctctttggatatctcgcaagacttgggatttgtcacaaaaggtttaagcgcaaaggttttagtgaactttaaaaattggtcaaactcttattatacccgttcgctatctccttattactatcaggtacagcccgatagttacgatcccgaaaatgatacctatgctttgcgacttttgcaaactggtacggattatatcagccagtctgacatcactaaagaggccgatcaaacattctatttggatgcccgtttggattggaaacgttcgtttggcaagcataatatgactgccatgttcatgtatatgatgagagagtatcgtaatggagtcttgcccaatcgtaaccagggttattcaggacgagccacttatgattatgacaaccgctacttggtagagttcaatttcggttacaatggttccgaacggttggcaaaggaggatcgttttgagtttttcccagccgcatctctcggttgggtattaagcggggagcagttttgggagccgattgccgattatgtggattatttcaagattaggggatcatacggtttggttggtagtgaccagttcaacagtggtgcacaacattttctttaccaaaatcaagtagctattgggagcggtgcctcttggcattcgggacttcccgggcaatggttaaatcgtcaggggcatggtttcaatattcttgccgtacaaaatgcaggatgggaacatgtgaaaaagttggatatcggacttgacgcttcgctttttaaccaagtgaacattacattcgattatttccgtgactaccgcgaccgtatcttgatgaaacgtgccagcttcggaaagctactcggttattggggcagtacgccttggagcaatatcggcgaagtgttgaataccggtttcgaagtcagtgtcaattggaaaaaacaatttggaaaagactggcaagtcgacttccgtggtaacttcacctataatcgaaacgaatacaagttttctgacgaaccgaattatccctatgtatggcaaacggaaactaacaaaccgttgaatcgattgaccggttatgtggcagaagggcttttcagcagtcaagaagagataaataattggcctgatcaaacacagttaggttcgaagccgatgcctggtgatattaaatatcgcgatatcgatggtgatggtgcgatcacatccgaggataaggtaatgctttcgccttacggtgatatgccgcgtatccaatatgggttaggattgaacgttcgttggaagaaattcgacttcggagtcttcttcaatggttcggccaaacgtaaaattatgatcaattccggctttgctccatttttggcttccggtggcgatggtggtccgtcggaatctttaccacgcaatttgatgtcgtggattgccgagagccattggtcggtcgacaatcctaatccggatgcactctacccgcgtttaggaacttcaaatgctgacatcgcgggtaatatccaaccgagttcttattggatgcgtaacggcaatttccttcgtttcaaaacgttggaattgggttataccttcccgatgtgccgcgtttatttcagcggtgataacttggccgtattcagtcccttcaagttgtgggatccggaattggcttggaacgcttatccgttgcagcggacttttaacctgggggtgcaatttactttctaatgtttaattaactaatagaataacgagatgaaactaacaaaaaatatcagacaatatatcaagatagccttgtcggccggtctgctggcattcccttcttgcagctatttggatgtcataccaccggcacagccggattttgatgacacaatgaaggacgagtcagcaactttaggtttcctttttaccgcttactcaggtacttcgcgatataccttctggcgagaaagggatggagatgcttcgttggccaccgatgaatatgtcgagccgaaagactgggactggaatatgcagaaaatgttgtacggaaccgtttcggcggccgatgatatcggtgactgggagaatttatataactacatcggatatgtccactactttttggaacagttggatcgtttgaacccggcaggtgtgacagaggaggagaaggcacaataccgtgccgaatgctggtttctcgaagcatattatcatttcaaagtattgcaaaactatgggccttgtcctatcatcgaaacaaaggtagatcaaaacatccttccgtccgaaattccggggcgttcgcattttgattattgtgtagattggattgtcggaaaattagatgcggcagccgaagttttaccggcaacacagacaactgaaaatttaagccgtgcagatgccactatctgcaaaagtttgaaagctcgtgtgctgctctatgctgcttctcctctttggaacggttcatttgtttatccgaactggcggaacacaaattatgagacaccgggctatggaatggagttggttagcaataaatatgatcctgccaagtgggaacgtgctctgacggcttgtaaggaggcgttaacagctgctgaagctgccggatataaattgttcgatcttgaagcttctgaagcaaaggctgctattgataaagtaccgcttccattcattccggggaaagaagaggatacggaggaaaatgaattgttcaaaaagcaagttcgaatgctccagtatatgattacggcgcatgaagggtttagtaataaggaaattatttgggctatcaatcctcagtatggtgatggtaatgatgcgaatgatgttggttgcggtcgttcgaaatcgcggcttccgaaccgacttgtcaaaaagagtgacggttcgtgggccggaggctatcatgggactgcacctacttgggcggctgtaaaccgtttctatacggaaaacggtcttcctcctgctaaagatccggatttctatttgcaaagcgagtggctgacacgttactatgagggagcttccagtccggagttgtcgaaagatcaattggatagcgaggaaattaagaatgatattgtcaagtttaatgttggtcgtgaaccgcgttactatgcgtggattgcctatgacggttgtgagtatatgccgttaatcaacaacaataacccattatggctgaacttgaagaattccaatacgaatggttattcactttctaatacgcgtaatgcaacaggtaccggtttcttgaataagaaattcatcgtgccgaacggggtatatctgtcttccggatccacttcaggtgacaagttccggatcattctgattcgtatggcggaattgtatttgaatttggctgaatgttatgcagcattagatcgtacagatgaagcgttagagaacctgaatgttattcgggaacgggccggtgtacgtaagttgactacagctgatctttcgaccatgtcactgatggaatgggtccgtaatgaacgggcaatcgaactgcatgccgaaggtcaccgatattatgacgtccgtcgctggcgtattgccgaccaagtaatgcagccctccgaatttaaagggctgaatggaatgactgtcaatccttcatttgaggagttcaatcaaatcgtgccaatcgaccagccgatccaatggaacgtcagacagtatttggttccgatcaagaatagtgaattgtacagtgatcctcagttggtgcaagctcctggttattaatctaaaaaacgaattgtatgaaagtgaattatataggaattgcatgtctggctgttcttttgttgacagcttgtgacgagtcgaaatatgaattggaaaacttagtgccggaagaatatcacaaagtgctttatattaataaatccggtacgcaggagctcactctttacaatacgggagagcttaatacttatgctttctccgtttataaggggggtagtgatccgtcattgacggcaagcggggaaatagccgttcactcgcaagaggaagtcgatgtactttatggcgcggactatcggataatcccttcaggttcttattcgatggacaccgatcgattggattttgcgtcggaggaacgtagtaaagtcgttacgctttcgttgtcgacagatttgatcggtgcggcgatggaggcgaatccggaagcgacttatgtgcttccgctttacctgacgagcgagaaggactcggtcaatgccgataaaagtgaattgtttatccggataacagatgtgttgaccccggctatggggttcacggataccgacattcagccattgtcttacacatatggattcaacacggagtcagttgaagtcggtttcggtttggatacggacaacaattgggatgtagaatgtcagtttgtcgtagatcccggatatgttacagcttataacgcagagaacggcacagcttataagctgtttccggaagggaactattcattcgaagatgttgtcaccttgcctacggggacgagcacgaccgatttggcggtgacgatcaacggcaacggattgactccgggagaatatatgttacctattcgtttggataatgtttcgctgttcaatattgctgaaaacgccgtctacccgttggtagttcgggttgtcggaatcaagttggatcgtgcgggctggagtatacaagccaatacggaagaacggaccggagaaggtgccggaaacggtgtggcgacatgtttgctggatgggcaattatcgactttctggcattcacaatggagtggcggatcgattccacttccgcatgaaatcgttgtggatatgaagaaggaaacaactttgaccaacatcagcttgactgaaaggcagcatgatagctaccgggatgtgaagggtggtgaattttttgtcagttcagataagctcaattggacagcagtcggtgcatttgaagcgcagaaggtactcgaagagcaaatcttcagcatcacaccgacaaagggacgctattttaagataaaaattactgatagttatcgtgcaagtaattcgtcgttggctgaaatcaatgcttatggaatagattgatttttgatgaatgttcggaatgctcaattgtaaatgccttttataggaaaaagaggcacttgtgaattgggcattccgtaacaaaagttcagaatcgggatatacttattgtataatattgtttattcaataatgctttacattctttatgggttgctgcaaattttcgtatttttctgataaaaaggactttgtcgctataaagacggtcatcatgacgatgaagtcaaccttcatgctgatgatcccccggaatcttatttgaaatagaaaaaactcagataaggttttttgtatctacccgaaaaatagtggtgctggagctttcaaggtaaagttataataaaaatggaaccgaatccttccgtactccggaacgtaaccgatccgtccatttcttttactaactgtttcacactgcaaagtcccagaccatggtcgggatgaacttttttcccctcgatttgaacacgatagaactgtttacccagttttttctgtgctttttgcggtattccccaaccggtgtcctggatggcgatagaaagatgattgtcatgttcagataaaacgaccgtgattttaacatcgtcgtccgagtatttcagtgcattttccaatagatttcgtaagcaacgttctagacgggtcggatctgtatatattttaatgtataggaactggattgtccgtaagcattcggtggatcacgtattttttcatcaaacttccgtcattatttttgtgccaaaaataagatttatgatgacatgagaagaagtagcagagataatgaactacagcaaagagcataaaatgacttattaagtctagactgaagtaactaaacattccttcatggctattttatgacagcaagtctcgttatgccgcagaacaatcatcaggtaaaacggcccgggatgagtttttcgaacttccacacggtggttcgtttgttctggtttccttatttgccagtacaagcggtcggaagcatcactacggactcaccagtggggttgaaggagatagaaatacgcacactagccggatgtgtcatacgtatctgcgatgagataaacgaaaaggaacagttttcaatcatccaagcatgcagctatgttcagccttaatgacagtatgcgctatctgttgtataactgcccaaccgctatgcgcaaaagtttcatgaagtccgtgacttgagagccttcaaaaacttcgaaaatagtactgactttttagcctgaaagcttctgtatatcattgtattttgtatatttacaatgtgaaataaagagatacagatgcttatggaagaacagaaaagccttattggaagagattgagatacttcgccatgataaagcgatgctcattaacagggttgcttctttggagcaatccttgtattggcttagaaagaaggtcttaggtcggataaatgaaaagagttttccacttggtcctaatcagcttcttttgttcttaaaggaagaaatgtcttccatggaaatattccggatagaggaagaagttcgcaagaacgaggaagaaatcaccaaaaacataaaagttaaggagaagttggtccacaactcccttggtatatcctctttgctagtagaagttatcaatctttatccagaagtgacaactgacgcagaagcaggctaaagaatgatttcattgaaatcgggaaggaagaaagttcccatttggaacgcgtttcggcaaaagcatatatcctgaaaaccgtccgtcacaaagtgataagaaaatccgatatggaagtttgagcagattaaaggaatcaccctggtcggctgctaggcacacatcagaagaagatgcgtggatgccttggaggagaacagggttctggccacacaggcgatacattatattagtaaattctgatgccgatgaaaccggactcacggcagaagaacgcaaggaaaaacgtatcagcgaagcttttccgatgattcttgagtttgaaaactggctacagaacacttatctttttaagaaaagtcccatattacgaaagagacgaaaaggatatgacagagtttctctctcgtaattgggtaaaattcaattgggcttgttccgaatatagatactattaatttcgaatcgactacgaatagcactgattcggaactaattctccaaatttacaacgtagtttaccgaatgcttatgtttgagtataaaattactaaagtgtgtcaattttgaaacataaaaaaatcaaatttaaaataagttataaatggataataggttactttgtcaatatcgaattaatatcatatatcatgaagaaaagaacaaatgtaaccagtaagaacccaattataatcgatttgatcaatttgttcagtcgattaaaattgagagtgggattctttagatttgttgttgaattattgatactatgtagatctcctattctacttaataataatgtctaatttagagatgttaatggtattaatttgaggcaattattgaaatttgtgattcaatttatttatgtgagaaataaatggttgtaagttccttagaaggttataccctttttaagggtataactggagtctatttttattcatttgaaagtataataactttgtccttaagcttgttctatttaacgaagctaatatttatgaaaatagtcagatttaaaactgtaggaggaaaatcattagtcatgatttccttattgttgatggctcctatgcatatttattctagtgatactttcactatacaggaaaagactagagtacatcagcaaactgtacagctaacgggagttgtattagatatccaaggtttccctttagttggtgtaaatattatggaaaatgccacaaatggtacgattacagacattgatggcaaattttctattaaagtaactcctcaatctgtattgcatgtttcttatattggatatgttacgcagacagtcaaagtcggaaataagaagaatatatccatagttatggaagaagactctaagaccctagaagaagttgtagttgtaggttatggatcacagaagaaagtatcagtaacgggtgctgttgctgccattcaaacaaaagaattaaaacagagttcagctgcaaatttatcaacagcgttggctggacgtatgcccggtttgacagctatgcagacttcgggacgtcctggtggtgatgatgttactttatatttgcgtggagctggtacggtaaatgggtcgaatcctttaatattaatagatggtgtaccgcgtgataatatatcaacaatggatcctaacgagattgcatctgtttctattttgaaggacgcttcagcaacagccgtttttggtgtacgtggtgccaatggtgtaataatgattacgactcgacgtggagaagaaggtaaatcagagttaagtatttctgctgattatagtttacaacgatttactgctgaagccgatcgtattcattcttgggagttcgctgaattaagaaatcaagccttcagaaatgatggatatgcagaaagtgatcttccttttaccgattatatgattgagatgtatagatcgggaaaagatcgtgtttattatcctgacagggatgtttataatgaatttttcaagaagtgggctcctcagacacgtgtgaatgtgaacttaagtggaggaactaagaagttaagttactttatgaatgttgcctatatggggcaagggggacagtttcgaacggagtctgaaaaggatttaggatatgatccaagttataaatcaaatagatataatttccggacgaacttggattataaggttgcgtctaattttaagctttcattgaatattgcgtcttatttggaaaaggtgaatactcctcaaacagcaaagttgtttaacaatagtgttgatgagttggttacgaatatgcgagcttatatttgggcaacacctccaacagatccaggtccattaacggttgcaggacaaacattggcagatgggacgaatgttcctgccggtcaagttataaatcaagcaggtatagaccgaaatacatatggagaattaagtagaagaggctatcagcaagcaactagaacaaatttaaattcttctattattgcagattggggactggactttataacaaaagggttaagtacaaaattgatgatctcttttgacacaaaagctatgactaccttgcaaggttttcgtgaatatgatacatatggagtaactgttgcaagaacttctgaggaaaagtcttatgtatcaaaagtccgtatgaatacgaatgatgcaatttctcttactaaaagccaacaaaccaattactatttaaatatgcagtattcgttgaattatgctaggcaatttggtttacatgatgtaacaggtatggcgttaattcaacgtgataattggcaacaatatgcagcagatctcccttacaatatgttaggaatatcagctcgtgctacatacagttatgattcacgttatttggctgaagttaatgttgggtataatggatccgagcagtttgccaagggaaaacgatttggtttctttcctgctttttctgctggatgggtggccagcaacgaagcatttctgaaggacaatgatttcattactaatttaaagttacgtgcatcttatggaaaagttggtaatgataaattaggagctactcgttttttgtatataagtaatatatcaactggaggaggggttattccttcactaggtcgtggacaagcaatcaatcaaggtaagttgggtaatcctaatttgggatgggaaatagcatacaaacagaattacggaattgatgttcagttattcagagaattatcgttaactgttgattattttagggaaaaaagagaagatgtattgatatctcgtggtacagttcccgaaattcaaggtgtagctttaggtaatttgcctaaagtaaacatgggacgtattgataaccatggctttgaatttgaagcaacttataataagcgaattgataaggattggtcttttacagtgaagggtaattttgcttataataagaatacacagcgtttcatggacgaggcacagaaaccagctgattatgtttatcgttatagaagtacgggatatagtattggtcagaactttggatatcgaatagactatagtaatggcaatggatatattaatactcaagaggagttagataaagcgttagcaacttatcaggtaggaggaacccctcgcatgggggatttcttgtatgtggatttgaatgaagatggaataattgatgaaaaagaccaagctcctattaaatatagtgatattcctcgtattacatatggattttcaggttccgtgaattggaaaaattttgatttttcatttttattctcgggtatagcaaaggcttctcgtttgtatgcaggttggggtgcaacggaatttgctaatgtcggtttttttagtgattatcatttgcaagcttggacaccagaacgctttgccaacggggaagaaattctgtatcctgcattggggtcagctccaggaactagtcaaaaaccgaatgacttctttattatggatcgttcttttttgcgtttaaaaaacatagaattagggtatacattgcctaaaggtcttttgaagaaggtaggtattaatagtacccgtatttatgttaatggtaataacttgttgacatggaaagctatgaaaacagatgtgattgacccagagcagggctctgatctcaactatccaattactaaaatggtgaactttggaattaatgttacattctaattattaaaagaataactgtatgaaactatcatatttatttatatcttcagttgtagcgttaggctcatttacctcatgctcggatgttttggatgtagctcctgacgggacacttagtatggaggaagtgtatgctgatccagacaaagtgggggcattattgaatgcttgttataacagtatacctcagaaaggatatgtttactatttctttgatcccttaattactgcttgtagtgatgatggatggtcttcagaggaagtacaaggaacagctattcaaggtgcatatagtggaaatgcttcagcttctggtcatccgatacgtgatatgcatgatggtcatggttcttccaataatgcttattggagtaggtattggcaacaaatacgtttgtgtaatcagtttttggagaatattgataatgcagcagtacatagtgaaactgaacgagcacgttttaaagccgaagcacatgttttgcgtgcctatttttattccgaattaatcaaatggtttggaaaactgcctattgtagataaaactatagaatttgatgctgatttttcgacattgcgtcgtgaaaaggtttatgatgtggtaaaatttatagcatcagactgtgaggctgctatttcatgtaatgaattaccttggcgaattacaactgatgatgaggctatgcgtgcaacaaaagctctcgcttgggctattaaatcaaaaatgatgttgtttgcagccagtcctttatttaatgaaggggaagatcattgggaagaagcatatcaagtgaataaacaggctgttgatgagttgaagaaaaatgggtatgaactttttactaaatgtacaaacccgtctacttttggaacgtatgacgcagctgcatttcatcagttagcttgtcagaatgctgattattcagctgaacctcgtgataaagaaacaatttggcagcatcgtgcaggaagcgtttttgtgtggcatgttggctatattggtagtaatatggacggaacattcaaatgtggaacatgtccgacgcaagagttggttgatgcttttgaaacggtggatggtcaacctatattggatttggctaaaccatatttggatgaaaaacatttacagccgaattataatctcaataataaaatgtatgatccccgtaatccgtataaaaatcgggatcctcgtttaatggcaaccgttctttgcaatggtgattctctgatatggaataatggtcaagtatttacagtcgagacttttgaaggaggacgtcatagcattagtcttgatccatctaatcgagcatcaagccgtacggggtattatcaccggaagttggttactcctcaagcctcaaatactaatccaatcaataattcaaattggaagtttttccgatttggagaaattcttttgaattacgcagaagctgcagcagagtctggacatttggcagaagccaaagctgctgtagatgaagtcagagctcgtgtgaaaatgccggctcttcctattgggctttctaaggaagagatgatcttgcgcgttcataatgaacgtcgtgtagagctagcttgggaggaagttcgttattttgatttgcgtcgttggcaaaaacctgatggtaatttgaacgaaacgtgtcagtggtttactggaatgagaataacgaaactgaatgatggttctttcaattatcagcgttataatatttcatcaaatccacgtggtggatatcagaacagagatttattgttgcctttacctttggatgaagtttctcgtttggaatcaacaactggtgaaacatggcagaatccaggatggtaatatttagtctaattaataaagcatacaattatgagctacataaaatataaaatatccatgttagctgtttgtgctagcttgatctcaccaggtttattgagttcagcgcaaaatgtagattcttctatacaattgaaaggtatggttgtagatgagtttggaaaacccatatcaggagctcttttgaaatctgaaaaaggaaaatgtgagtatttgacaaaagttgatggaacttatgaatttaacttaaaggacggtagtcaatatattacagtttcttatattggttattcagataaaatagtttctgtggataataaaacagaattaaaatctattcagttaacttttgatgcttctaaagcagatgaattagtggatttgggatatatatctttacccaaaagatctgtaacaggtgcagtttctcaagtgacaggattagacttggataaatcaccagaggctaatttgaccaaaacatttgcaggtcggtttgctggtttgactactatcgagaccaattcagaattgtcacgaggtgcgctgagttcttcttctacaggagtaactatgttgatacggggattatctactattaatggacgtgaaccattgattattgtggatggaatcatttgtccaaataccaattatacttatattactccgaaagaaattgaatcaattacggttcttaaggatgcagcaactacggccttatatggtattcagggtgcaaatggtgttatttctattaagacgaagcgggggcatattggaaagactactgttgatgtaaattttgaccaatctttccaacaaatgacgaaaaccccgtcgtttattaattcctatgattatgctcgaatgagaaatcaagctggttttaatgatggattagggtataattctcagttctctgcagatgatttggataaatttcaaattggcaatgatgctctatatcccaataataattggtatgatatgtttattcgtcctttaacatttatgtctagagttggtgtaaatgttaagggtggtaatgaacgagttcgttatttttctaatgtcaattacatgcatcagcagttaccgtttaaaacggctaatgagccaaatgcaaaatacgatccaactcctaagaataattggtttaatttccgttcaaatattgatgtgaagattaatgattatttaagtggatttatgcgtttatcaggtaatattaaaacagaaaaaacgacaggatatggaaatgaaactatttataatcatatttttaatctgccacccacgatgtatggaccggttactccatttggagaaggtattcttaatggaaatcaggtgattacacatgataatgaaaaaacacctgtatatggaatgttgaatcgttcgggctatattcaagctttagttgcaaatattaatgcacaagcaggtttggtcttagacttaagtttcttgacgaaaggactttctctgagcggagtgatggcttatcaaactaattcagtgaatcaaacgactacaacacaaaattttgagcgctatgttcgttcaaaagatttctccaagttggatttttctttgttaggatcagatagtaatactccacttgcatatggaaagagttccagtttttattataacttaaatctgtttgcaaatgtgaactacagtcgtcagtttggagatcatagtattgatgcattgggatatattttctatttacaacaggaaaaagaaaatgcatcaggatctcaaatcttaccttataaacgcgaaaatttgggtttatctgctacatacggttataaaaaacgttattttgtaaaagctgatttgggatattcaggatctgaacaattccatccagataatcgctatgtggctacacctgctatttctgctgcatgggttgtttcaagtgaaccttttatgagtaatttatcctggttgagtaatttaaagttaagagcttcttacggtttaacagccaatgatcaattagggggagagcgattcctgtatctagactatatagatattaatggtaatgaggggttaaaaggaaatcctgatttagtcgctgaaaagatgaagaaacagaattatggtgttgatttaggccttttcaatgaattaacagtttcttttgactggtacaagtctttgtgtgataatatgctagtaagtagtgctggtctggttcctgaatatcaaggcactgcattatccaattatccaaagactaattctggaaagatggaaaataaaggttttgaggtacaagttatgtataataagcaattaaataaagactggtcattttatttggcaggctcatttagttataataagaataaagtactaaatgtgaatgaatcaccattttctgatgaatatgcttatccgtatcgtactgagggatatagtgtaaatcaacagtgggggtatttgattgattacagtaatggaaatggtatgtttaacttcgaggaagaactagaacaaagtagtttgtcttacgcttttggaacaccacgagtgggtgattttatctataaggatttgaataatgataaaattatagatgaaaaagataaagctccgatattgaataccactattcctcagcatttttataatttctcgggaggtttcaagtataaaggctttgaagtgaattttctattccaaggaactggtaaattctctagatgtatttcaggtgtaggtgcatatgagtcagaatatcaaggtgtatttacggatttacatttacaggcttggactcctgaacgttggaataatggtgaggagattaagtatcctgcattatctttgagaaagtcaactaatcatcagccgaatagtttctttattatggatgcctcgtatttgcgtttgaaaaatgcagagattgcttatacattgcctgtgaatatttgtcgtaaggtatttactgagaggatccgtttttctttgagtggacaaaatttgtttacaattgataatatgcgttctaaattcattgatccggaagttggtaatatgggtactttccaaccctatagagtctataatattggggtaagcttaacattttaaattgtgatattatgaagaatctaattaatatattgaaatttgctgtttttggtttttgttgttcctcttgtgctgatttagatataccttcggatggacgtgtttcattgaatgagatttttaatcgatatgagcgtacgtctgcctattacacaaattgtttaggatttattcctcaagttggatttacgtatgaaagtaccaatactccattagcttcattttgtgatgaagcacatgatgcaagtgataatcaagatggtcctgtatcaaaatggtataaaggttatacgacagcagaatataacccattaacagctagttatatagatccttggtctcattattttcaaggtattaggcgttgtaatacattcttggaatgcattagagatccggaaatagctacttatgaatttgatgaaattgagaaaaatggctggattgctcaggtgcgtgtagcacgtgcattttattatttgcaattgataaaacgttatggaggtgttcctttgattgatacaccttatgagactaatcatgatttttctaaagataagcgtgctagttttgaggagtgtgctgattttattatctcagaatgtgatgcagcattgagtacggaagaatcagaaggaaagtctattggattccgttggaatattagtgataatgaaagaggtaaattgacaagagctgtagcttgtgctattaagtcacaaacagcattatatgcagcaagtccattatggaataataatggaacgagtaaatatacctgggaaaaagtgactgaaataacgaaagaggctttagatatgtgtttacagcatgggtttgctttatatgatcaagctccagattccactgttgcacagaacgcctatgcttattattttattacgcgttcagatcccagtcgttcttgggacaaggagacaatttttgaaacaacaacgtggcgtactaatgtgtggaagtttgcaggaacacctattactcctggtatggaaaaagcgggggctggtccttctcaggaattagtagatagttatgaaatgatagatggaactcagcctattttaggatattctgattctgatcatttgcatccaatcattaataaagaatcttcttatgatcctaaagaaccatataagaaccgagatcctcgtttttatgcctccatttattataatggatccattcgttatttggataatcctaatggtgataaggttgaaacatttgttggaggtaattgtggtatttcagataatgtaacagatattcgttttacacgaacaggatattatatgcgtaagtttaataattacaaatcaggtattggtcaggatgctgacggtttgatgcgtatttatcgtttggcagaactctatttaaactttgcagaagcagcttatcaggctgttgggccagatattcctgttgtatcaaaagtcggtgcagagtctttgtctgccagggacgctattaataagattagagtacgtgtaggtatgccggaattatctgctggtatgtcaaaagaaatttttgaaaagcgttatagaaatgaacgccgtgttgagttggcgtttgaagaacatcgtttctttgatgtacggcgctggaagatcttaactgaaacggatgattttgtaacagggatgaaaatagtgaaagaagctgacggctctttcacttataatcggattaaacttgcttctcgaggaacaaatacggataaatatttgctctatccaatcaaacaaagtgaagtggccaagatgttaaaacatacgggtgctgattggcaaaatccgggatggtaatatggtttaataattaaaaatacggtaaaatgaaaaaatatattttatttttaatctttgttccgtttctcattataaatgggtgtgatgataatgaagaagtaatgggaggtatagaccctgttagtaatgttgagtgtataccatttataggttctgtaactttgaattggactaatccggaaaattctgattattattatacattaatcacctatatgaattcagaaggagaaaaggtaaataaaaaagtaagtaagtatagtgttgacgatagtaataaagtgtcagttattgttggaggatttacggatgtaaatgaacatgaatttatattaacttcttttgggtattctggttcgtcttcatctcctgttattatcaaaggatctccacttggaattgaagcggcaaaggattatgtagttaatactgttacggcagaaccggcagatgaaggtgctaagttatcatggactaatgagacttctgttggggttaatctgattgtttcttatgtggataaaaatgagaaaaaacagattgttactattgatgctaccagaacaggagtttattttgtaactggcttgttgaaagaaacgaagttgacggtttctgctgaaaatcatcatgatggtggtaaatcagaagagaaagtttttatggtgactccgacaataaatccagatgatattgtttatccagaagtggaatacgtaacattccaaccgagtatgaatcagatgacaatcacatcctctaatccggataatttgtatgaatatacgattgtaacgaacggaggagatccatatattaattctaatggattggttgcaagtaaagcaggttcaacaatggtttttagatataaatctaataaggaaattaagttgcaaatattttggtgtacgacttcttctggtccagcagaagctaattcatctactgttaatttgcctgcttctgaggagtggaaaacttttgagtatgattatgcagctggtatgggcactgtaaattggggtaatcctggtgactacatgcgttgtgattttggaacagagcctaatgttacaataaatatcagaaatattcggtttaagtaatcttttatagaataacgatgagggtgtatacaattcctgttttgtttttgtaacacccttatttgttatgtctttattatagtagtctttaattgtacaatattgtttgttatgcaaaagaaaatttcaatatatgtactttatttgctaataggagtttttttgtgggggggctgtttgggtagagaagatgacactgcagctcaagttgtagggctaaaatgtcgtggattggttgatccaataggaattgacgaaccaatctttagctggcaaatagtttcagaagaacatgggtttattcaatctgcatgggagatagagattgcatcctctttaaaggcattagaaacaggggattgtatttggtcttctggtagggttgaatcggaacagcaacaatttattcgtcccattatttcagagttggaaaagagtttcaaatattggtggcgtgtgcgtatttgggatgctaatagtaaagtaacagcatggagtaaacctgcctcatttgtattaggtattcgttctgaagagtggaagggtttgtggattacttctgagtggaaagagaatagttcgatgccttactttcgaaaagagttcaaagtagaagacgatggacgagaagttgaaagtgctattgtttatttttgtggattaggttgcggagatctctatttgaatggggctttggtagatcaaagccgagttttagatcctgctcaaacgaactatgacaaatatgccttatactcaagttttgatatcacatctcagctgatacgtggctataattgtttgggtgtactgttaggagaaggatggtatggtcaaggtcaagtttggggtgaaaatgtgatgaaatatggaaatcctcttttccggcttcaattggaattagtttatacggacgggaccattgaaagggtcgtttctgacgaatcttggcagtgggctccgagcgcgttattgaagagtaatatttatgcaggtgaggtttatgatgctacaaaggagaaattgggttggtcgaatgttggatttatggcagataagtggaaacaagtagtggtagcgacagggacaatcccatgtgaattgcgtcctcaacttgttgagcctattcgtctgataaaagaactaagggcaataaagaagtggaaagatccagcaggtaattgggtttttgattttggtgttaatgttgcaggtgtacctcgaatagaagtgaacctaccgaaaggtactcatttaaaaatgaggatgggagaaattttgaatgaagatgggtctattgattttagcacgacaggtgtttttgcaacgggagttatacagaccgatgaatatatttgtgccggggatggtgtagaaacttggaaccctcgtttttcttatcatggttatcgttatttagagctctcaggcttgaagtcagaaccaaatttggattgtgttaaaacaattgttgtgcattctaacgtacaacaaagaggtgaattcgagtgttcaaataagcagattaacacattgcatgaactggcaattcggacgatgttgagtaatacgcatggattaccaacagattgtccccatagagaacggtgtggatggttgggagatgcgcatacagtagcaccttttgaaagttataattttgatttaaataatttctggaataagtatctacaggatgttcattcaacttcatcaaattatgaaaagaaaactttgtatcagaaattgtataatacggctttttattttgcagaaaagaaatcaggtattccttatatgatatctccaggaaagcgtctctgcggggttgcttcacctgattggggaacagctgtggtgcaattaccttggtttacctatctgttttatggagatgatgaacctttacgaatttattatgatgaaatgaaacaatgggtcgaacatgtggaacaactgtcaatgaacgatacacttccgagaaaacatattgttccttatggattgggagactggtgtcctccaggaggaaatgaaactattgattgtccaatagcacttagttccaccgctttccattattttgatgtttctattatggaaaaagtcgcaaatcttttaaaaaaaacagaggatgtatattattttaactctctaaagaaaagtatatatactgcttttgtcgctgaattttatgatatgaaaaacaaaacatttggcagccagacggcagatgcaatggctcttgattttggcttggttccaaagggggatgaaggggccgtttctaaagcgatagcaaagaatatggaggagaaatatgataattttcttcatataggtatttttggtttaggacgtataggagaagctttatctcgttatggaaatggaaaaaaagcgtgggagctatttacaaaaactggtgaaaatagttttgcatatatgtggactgatgctgaagcaacaacattgtgggaggttctcccaataaataaacagagtaaagaattttgtctgcagaatcgttcttcattgaaccatcctatgcagggagggtatgatacgtggttttatgaagatatagcaggtattcgagttgacgaatcgggggcaggatttaaagtcgttcgattagagcctacaatggcctcttatttggaatgggcttctgcttccgtatattcgggatatggtaagactgttagtgattggttttggaaaaatgatcagtttatttggaaaatagaacttcctgcgaatacatcgggattagtcgctttaccgaatgggcgacaagttgaaattaatggtatagattttagtaaggaaacatttccattagttgaaaaaagagaaaagagtaatctctattgttttttatctggagagtataccattgtgataaaataaaatggatattatttttattgttaaacttataattacgaaatcatgaagaatctattgttaagcatagtgggaggatttgctttatcgggatgtgtaggtgtactccatactaatgaatctgttcaacaagagacagattctaattgggatctctattctgatacgtgggtagcaacggatgctttggggcgaacgatgcctggtattgaaaaggtggggccggtcaaggatgataagaaaagaacggtaggtattttctatatcacttggcattctgataatttggcaacgttgaaagctccttatcgagcagatgtgatgaagatattggaagaagctccggaagctcgtttagatgctaatcatccgttatggacagaaggttcttatcattggggtgaaccagaactggggtattttttaagcagggatgaatatgtcattcgcaaagatatgtctatgttggcagatgctggagttgacgttttggttatggatgtgaccaatgctgttcgatattgggcagaatgggaaacattgtttactacgatgttaaaaatgaaagcagaaggaaataaagtgccgaaattctgtttttgggcattcaatggaccggtaattacggttgttcaggatttgtatgataaagtatataaggaaaataaatacaaagatctgtggttttattgggatgataaaccgttattactttataacgcaaaaccaactcttgatgcgaatggaggtggtgtgaagaatccaaatcctcattatgatcctaaggctttgactgatgcctctcatcctcattataaagatcctgattatactagtgagttttatagtgattatactaaggaggtaaaaactttttttacactgcggaacatgtggtggggatattatgaatggggtggagaacgttttgttggaacagaaggaaattggagctttggttatgatttgtgtgatgaacgtgtttgtaatatggatccatcatcgttgattgctacttataaaggagaaaaggaacaagcggcagtgacacctgcacaacatccgatctcgattgttggaaaatcgtggacgcgtgataaaaaggagccaaagttgaatgatcgagatatgccggagccaacctatgtaccttggttgggaaaggttgttgatgatccgacagcctatggtatttatttccaggatcgctgggatgaggctttaaaagaggatccgcaatttctctatttgaatgattggaatgagtggtctgcaggaaaatataaatcgggcaaggccccaggatctgaatctcctggtcccactgattttttgggccgtaagaatcctttttattttgtagatcagtataatgccgagtttaatcgaaccattcaaccgatgaaaggaggatatacagataattactatatgcaaatggcacaaaatattcgtcgttacaaaggggttcgccctattccggaaaatcgtggatatcagaagatgtctattgatggtcaatttgataagtggaagaagataaagattgaatatcgtgatacgaaaggtgatattacgcatcgtgattataaaggatatggaggaaatcattatataaacaattcagggagaaatgatattgttttgtctaaagttgcagtagataaggagaatgtttatttctatgttcaaaccgcaaatccgataacatcttcaactgatccgaactggatgttactactaattgacgcggataataactattctacgggatggtatggttatgattatttgattaatcaatcggtagtggataatacgtcaacacaaattaagtggtatgataatacgaagaacgaatgggttaagaaaaatgtacttgcttataaagcaaaaggaaattgcttagagctagctgtgagtcgaaaagacttggggttactagaggatgcttttgtttttgatttcaaatgggcagataatccgaaagagttgaaagatccaatttctttatgtacagacggagatactgcacctaatcgcagatttaattatcgttgtatttggaaaaaataaagaatgaatatgaaatattattggcttatatatttattgattgtagggaatataacggcttttgctcagttgataaaagttaatagtgatacatggtcagcaacagatgcgttaggacgtaaggtgtgcgaatatcaagatgttggggaaaaaaagaaagataagtatgtagctatgttttactggacttggcaccaaggagtggatgatacaacctacactgttaaaaacatatcggaaattgtacgtaaatatccagaggctatggcttcatatgatcatccagcttggggtaataaaaaacctggttttttctattgggaagaacctttatttgggtattatcgtacgaccgatacctgggtgttacgaaaacatgctgagatgttggctgatgcagggattgatgttgtcttttttgattgtacaaatggaagtttaacttggcaagattcttatgaggctttgatgaaaacttggagtcaagcgagtaaagatggggttaaggtcccaaagattggatttatgttgccttttggtccactgccgcattcgttagtttcgttacgccaactttacagggatgtctataaacctggacgttatcaggatttgtggtttgtttggaaaggaaaaccgtgtattatggcctatcctgataatctgacaaatgatccggtggatcgtgaaattgcacaattctttacattccgtccaggtcaacctgactatgttgatggtcctaagcgtaacgatcaatgggggtggttagagatgtatccacaacatggttatgtccctttagctaatggaggatatgaacaggtaacggtaggtgttgctcaaaatgctaatcctgtgagtaagggacactgtagtgcattcaatttacccaatgcgtatgggcgtaactttacagttcaaaaaggttttgatccacgagtggaaggctatctgtacggatggaattttcaagagcaatgggatcgtgctataggtatggatcctgaattgatattcgtgactggatggaatgaatatattgctggtatgtggttacctaaagataattggactggtgatcctttctcttttgttgaccaatacaattggaactgcagccgagatattgagcccaataaaggatggggcgacaagggtgacgtttattatttgcaattagtggataatgttcgtagatttaaggggatggataagccagaaatagcctcagagcctaaaacaatccacttgggaaggctgggtagttgggatgatgtgaagccttattatacttcttatcggggtaatacactatctcgtaattgtgcaggtcgatacaatacttattatacaaataacagtgggcgtaacgatatagtaggagctaaggttacacatgatgatgagaaaatctatttttatgtagagaccgcgtccgacttaacttcaccacagaaccctaattggatggttctgttgattgataccgatcgtgataaatccacaggctggaatggttatgactttattatcaatcatacatctccaaaagggaagcaggttgtggtagagaaaagcgagcaagggaaatggaaatggaaacaggttggaaaaggacaatttattgttaatgggaatgtgcttgaaatggctattcctaaatccgtacttgggctttcttcgtcagttaatttggaatttaagtggagtgacaatatgcaagatgaaggtaatattatggatttctatgtaaatggcgatgtggctccaggtgggcgttttaattttgtgtattgttctgtaggagattgagtgcatcctgtaaaatctctatgagtgatcattcgtaagcattcggtaaactacgttgcaaatttggggaattagtagtatctatattcggagcgagtttaattgggcctgtcagaaatccaattggtatccaataccgggtgtgtactgatatgaatgtgttcgtttgaccggaatttttgcggagttgcgagataatattgttcaggctttcttcactcgaatcgtttccccatatttcttcgagcagttgtttgcgtgtgtctacctgataagtgccgattttccatatcgcaggcagctgtttttcggactgttgcaataggttttgaatctgaaataccaattccgtaacgtcatacggctttttaatgtaatggttggctccggcgtcataactgcggatgatcttggctccgttcgtatgtgaggaagctatgatgatcggtagttgcggatattgtgagcggatagcgggaagaatgtcgaggcaactttgattgtttacctcaatatccaatatcagtaaatccggcagcatggaagccaaactctcttgaagcccgtttaatgttgtcctgaaatcgatttcaaatccatagtcgaccaaggcttgtgtaatcaaattccctaagatctgatcgtcttcgatgtatatgagtttgctgttcgtcattttcctttttttgtttcagagagcaagatagtaaaaacatcctatatgatataggatgagggaacctcttttcattttaaacaaaaacaacatacccctctcttgtcaatcccctaattataactacttttgtggctgaagaaaaagtaaaaactaaagtatgaagaagattagagctgccattgttggatatggcaatattggaaagtatgtattggaggccctggaagctgctcccgattttgaagtagcaggtgttgtacgtcgtaatccgaatgatattccggatgaattgaaaggatatgccgtcactgatactatcacgaagttggataaagtagatgtagctgttctggcaactccgacacgtagcgtagagacttacgccaaagaaatactttctttaggcatcaatacggtggatagtttcgatatccacggaggtattgtcgatctgcgccgttcgcttgatgctgtagcgaaagctcataataccgttgctgtcatctctgccggatgggatccgggaagcgactcaatcgttcgtgctttgttgcaggcgatcgttccgaaaggaattacatatacgaatttcggaccgggcatgagcatgggacataccgttgccgttaaagctatcgaaggtgtaaaggcggctttgtccatgacaatcccgatgggtacaggcgttcatcgtcgtatggtttatatcgaagtggaagaaggatatgattttgataaagtagctgctgccatcaaggcggacgactattttgtgcacgacgaaacgcatgtgatccaggtcgactgtgtggacgacctgaaagatatgggacatggcgtgaatcttgttcgtaaaggtgtttccggtaaaacgcagaaccagttgatcgaattcgacatgaagatcaacaacccggctcttactgcccagatattggtttgtgttgcccgtgcaagtttcaaacagcagccaggtgcctacacgatgatcgaattgccggtgatcgatatgctttatggcgaaagagaagacttaataaaaaaattggtttaaatgaattgacagtggataattgacagttagggaaggagcctcattctcttaaattgccagttgtccattgtcaattatcaattgatgtaataattatgcttgattttattacctggacggctgaccccgccatcttttccatcggttcgcgtgagatacgctggtacggactggcgtttgccatcggtttcctgatcggttacaagatcgtggaaaagatgtggaaaagagagaaactcaatccggcatggatcgattccctgctgatttatacgatgttgggaacagttatcggtgcccgtttggggcattgtctgttttatgcaccggattattatctggcgaatccgctcgaaattctgaaggtttgggagggtggacttgccagtcatgggggaacgttgggtataatcatcgccatctatttttattctaagcgggttagccatcggagcatgctttggacattcgacaaactggtggtccctaccggccttgtggctgctatgatccgattgggaaacctgatgaatcatgaaatatacggacatccgacagatctgccctgggggtttcgttttattgaaaacctgcatgcttggaaaagaggagcagctcccgtttttaccgctcccagtcatcctacacaactttatgaagccgccagctatttggtgactttcgttatttgtatgtggctctacttcaaaaaagatgcctggaagaaggaggggcttatcttcggtgtatttatgatttgcgtattcggttcgcgcttcttcattgagtttttgaaaaacgatcaggaagagttcgaggctgatatgatgctgaatatggggcaatggctcagtattccgttcgttttggccggtatctacttcgtatggcgtgccatgcggcttggaaaaggaatgaagaagatttgatttttgattttcaacttttaatttttaattttcaaagtgtataagttaaaagaaatagcagataaagtttactatgtaggggtaaacgaccggcaaaaagctctttttgagaatatgtggcctttgccttatggtgtatcttataattcctatctgatcgtggacgagaaaacggtcctggtcgatacggtggatgtgtgttattccgatattttcctgaaaaaaatagcggatgctctcgacgggcgtcctttggattttttgatcgtgaatcatatggagccggatcatgcgggcagtatccgtttgttgcgccagcagtatccggatgtccagattgtcggaaacaagcagactttcggcatgttgaatgggtatcacggtatctcgacgggattgtatgaagtgaaggaaggagacaccctgagtgtgggccgtcaccaactgtctttctatatggctccgatggtgcactggccggaagtgatggtcacttacgattcgactgacaaaatcctgttctctgccgatgccttcggtacttacggaacgttggatggcggtgtgatcgactctgaaatgaatgtggaacattattgggaggaaatgctccgttattattccaatattgtcggtaaatatggaaatcctgtacagcgtgctttgcagaagttgtcggctttggatatccggacgatctgttcgactcacggtccggtgtggcgtgaatatgcagcaaaagcgatcgatatttatgaccgtatgagccgttatgaaggtgaagaaggtgtgacgatcgtgtacggcagcatgtatggcaataccgaacagatggcagaagcgattgccgcttctttggccgcgaacggggtgaagaatatcgtcatgcacaatgtgagcaagagccctgcatcttatgtcttgaaagatattttcaagtataagggcttgattatcggtagcccgacttacagtaaccgtctgttccctgaaatcgaatcgattctggataagatcgaaacgcgcgaagtgaagcatcgtctctacggctatttcggctctttcacttgggcgggagctgcggtgaaaaacttggcggcattcggcgagaagatgaaatgggaagttgtgggtgttccggtggaacagaaacaagctctgaaagccgacaagtatgaagaatgctgggctttgggagaagaaatggccaagaaattgaaaactgagaattgaaaatggaaaattcttggtcagaaagaataaaggtattacttttaggaacgaaagaactaaattaaaaaaagcgtatgagactaattattgaacctaattacgagcaactttcaaagtgggccgctaattatgtggcagccaaaattaagaaggcgaatcctacggcagagaaaccatttgtattgggcttgcctacaggctcttctcccttgggcatgtacaagaatctgatcgaactgaacaaacagggggtaatctctttccagaatatcataactttcaatatggacgaatatgtaggtttaccgaaagaccatcctgaaagctatcattctttcatgtggaacaactttttcagccatatcgacattaagcctgagaatgtgaacatcctgaatggaaacgcagaagatctggaagccgaatgcgccgcttacgaagcaaagatgaaagctgccggtggtgtggacctgttcctgggcggtatcggtcctgacgggcatatcgctttcaacgagccgggttcttctttgtcttcccgtacccgtgtcaagtctttgacaaccgatacgatcatcgccaattcccgtttcttcgataacgatgtcaacaaagttccgaagacttccgttacggtcggcgttgctacggtattggatgcaaaagaggtgctgatcatggtgaacggtcataacaaagcccgtgctttgcagcaggctgttgaaggtgcggtaaaccagatgtggactatcacggctttgcagatgcacccgaagggtattatcgttgccgacgaggctgcttgtgcagaactgaaagtcggtacatacaactatttcaaggatattgagaaagacaatctttgtccctgctctttattgaagtaaattttttattattcataatagttttgatttaacatcgaaaggctgtgtctgtgatagatgcggcctttcttattggttgaacatgtccttgttgtagaagttcatgattgaaatcagttgatcgtgggcgatttgtgcgggactgtcggagttcagctccatcgccgtaagatagttgttcagggcctgccggatatccccttttttacggtaggcattgccacgtaagtaatacgcttcatcagaagatgtgtttttttctatgtattcgtccaacaaacggatagcttcgtctgttttaccgtcggtaatgagttgtttaatagtttccatttcgagatttatgatttgtaatttatgaattatagatgccgatttgggcagataaagtgcaaatttaaatcataaatcataaatgataaaccataaatcatggattttgtgtaagtttgcacccgatttcaaaaagataagacgttattatgcaaaagaatctggtaatagtggagtcacccgctaaggcaaaaaccattgaaaagttcctcggaaaagattataaggttatgtcgagctatggtcatatccgcgatctgaagacgaaagagtttagtattgacatcgagcacgactatgctccgcagtacgtgataccggccgacaagaagaagctggtcagcgaactgaaatccgaagccaagtctgccgaacaggtatggctcgcttccgatgaggaccgtgagggagaggctatatcctggcacttgtatgaagtgctgggcctgaaacctgaaaataccaaacgtatcgtctttcatgaaattaccaagaatgccattctgcatgctattgaaacaccacgcgatatcaatattaacttggtgaacgcccaacaggcacgtcgtgtgctggaccgtatcgtggggttcgaactttcgccgattttgtggcgtaaggtaaaaccggctttatcggccggacgtgtgcagtcggtggctgtgcgcctgattgtggaacgggagcgggagatcaatgaatttgtaagcgaggcggctttccgtgtgattgcaaacttcatcctgcctgacggcacaacggtgttgaaagccgagttgaaccgccgcttgaaagataagaaagaggtggaagcctttttggaatcctgtaagaatgcttcgtttacgattgacgatatcacgacgaaaccggtaaagaaatcgccggcacctccttttacgacttccactttgcagcaggaagcggctcgtaagttaggatactccgtgtcgcagacgatgatgatcgcacagcgtttatatgaatccggactgatcacttatatgcgtaccgactccgtgaacttgagcgatctggcattaggtacggcgaaagaggctatcttcgaaacatacggtgagaaatattataagttccgccaatatcataccaagagcaaaggggcgcaggaagcacacgaagcgattcgcccgacttatatcagtaatgtggaggcagggagttcttcgcaggaaaagaagttgtatgaactgatccgtaaacgtacgatcgcttgccagatggcggatgccgaattggaacgtacgactatttcggtcggtatcagcggacagacggaacgttttgtcgctgtcggcgaagtgatcagtttcgaaggtttccttcaggtttatatggaaagcaatgatgacgatacggagaaagaacaggaaaacggcctgcttcctccggtaaagctccatgagacattgtcattgaaagatatcgtggcgacagagcgtttcacgcagcgtcctccgcgctatacggaagccagtctggttcgccgtttggaagaattgggcatcggacgtccgtctacctatgcgccgactatccagacgatccagaaccgcgaatatgtggtgaaaggagataaggaaggcgtggaacgtgcttacacggttgtttcgctgtccaagggaaagatcgaggaagcggaaaagaccgagaccgtcggggccgaccgcaataaactgatgccgaccgatatcggtacggtagtaaacgactttttgatggagtatttcccggatgtgttggattacaactttacggccagtgtagaaaaagaattcgactcggttgcggaaggcgaactggtatggacgaaggccatcgataaattctataagattttccatccgatcgtagaggctacggctgccgttaagaccgaacataaagtaggggaacgcgagctcggtatcgatccgaagagcggcaacccggtgtttgtgaagatcggccgctatggtcctgtcgttcagattggggcggcacatgctgacgacaaagaggcgccgaaacctcagtttgcctctctgatgaaaggccagtccatcgatacgattacattggaagaggctctgaaactttttgatcttccccggacggtcggtgaatatgaaggcaaggtgatggtggcggctgtcggccgtttcgggccgtttatccgtcatgacggtaaatttgtttctattccgaaagatttgaatccgctgacgattacggcagaggaagcaatcgctttgatcgaagggaaaagggtgaaagacgaacaacgttttatcaagaagttcgaggaggatccggagatggaaatcctgaaaggtcgcttcggcccttatatttcttatcagaaagcgaactatcgtattccgaaaacggtaaccgacccgacaatcctgacacttgaagattgtaaaaagatcatagccgaagctggagaaaaaccggctgcaaagaagacaacgcgtaaaaagaaagcctgacaaaaagcttacttaattgcaaaaacaactgtcatactatcatgttctgctcttgatattatgaatatcaatgtttgtgtgagatgatagtaggcatgatagatgttttttcaactatcatgctatcataaagactgtatcttttttacgcgttttatatagcttattttcataagaataactacatatttttattgagacccggatgtcggctacctgcagacccgggtgtcgatacccgtcagatggaggtataaaaggctctgatacgggtatttcagggagaagatctaatgtcttttgtgtaaaaaagtaacgtgttccggcaaaaaagccttatgttttccggaaaacagtctgtttttaactcttttggagtgtttttgtttcgggtaaaacggctaaaatgatggttaaacagctgatttatgatagtagaatgatagttaaaaaggaaactatcatatctgcatgttatgatattcaatcttcacacaagaaacatgatggtatgatagttgtttttcaaatttttttattgttggcatatctttgcaccttcttcgctactttccattagcttgatggcaaaagtagtgctaatatacgggccagcacattcttcttgtccgaatctttctcgattgtcgccagctttgtataaaaacaatgctctctgtgacttcattacgctgaaatcgcaggagagcatcgtttgtctgttgatctatattcatgatccgtttcttacattctctccggaacctcgattcccaacaatgacatggccgatttgacaatcttggctacgttggcggagaggacaaggcggaactcttttacttcttcattctcttcgcggaggatggagaaatcgtgatagaactggttgtattcttttaccaggtcataagtatagttggcgatgagggcggggctgtattcctttcctgcttcgcgaacgacggaagcgtagtcagctatcatctggatcaggttttcttccttctcggatatggtagtcgttgtcggcagttgttcgggcaaaacgatgccctgttcggcagctttacgcagaacggaacggatacgggcatatgtgtattggatgaacgggccggtattaccgttgaaatcgatcgattccttcgggttgaaagtcatgttcttgcgcgggtccaccttcaggatgaagtacttcaaggaaccgaggccgaccatgcgggcgatgttttcggcttcttccggtgtcatttcgtccactttgcccagttcctgcgagatttcgcgggctgtacccaccatctcttccatcaggtcgtctgcatcgacaaccgttccttcgcggctcttcatcttgccttccggcagttcgaccatgccgtaagagaaatgtacaaggcctttgccgaattcaaaacccaatttatccaacaggatggacaatacctggaaatggtagttctgctcgtttcctaccacatagatcattttgttgataggatagtcgtcgaaacgcaatttggcagttccgatatcttgtgtcatgtagacggaagttccgtcggcacggagcagcagtttctcgtccaggccgtctttggtcaggtctgcccatacggaaccgtcttcacggcggtagaaaatgcctttgtcgagcccttccagcactttgcctttaccttccaggtaggtctgtgattcgtaatagatcttatcgaagtctacgcccatcattttgtatgtctcgtcgaatccggcgtacacccagttgttcatcatttcccaaagagcgcgtacctccttgtcgccggcttcccatttgcggagcatctcgcgtgcttcggccatcaggggagaagcggcttcggcttcctctttcgtcatgccttttgcttcgagggcggcagtctcttctttcagtttgttgctgaaaaggacgtagaagtcaccgatcaggtggtcgcctttcttgccggccgtttcgggagtcacgccgttgccccatttctgccaggcgagcatggacttgcagatatggataccgcggtcgtttacgatgttcgtctttaccactttattgccgtttgctttcatgatctcggacaggctgtaacccaataggttgttacgcacgtgtccaaggtggagcggcttgttggtgttgggagaagaatattcgatcatgaccagcggagactgttccgttacagggatgatcccgtatgacggctggccgttgatttcgtttaataaatcgatccagcaggcacaggcgatggtcaggttgaggaatcctttgattacattgaattcggctacagccggttcatgccggagcaggtattcgccaatttcctgggcagtctgttccggagatttcttcgacatgcggaggaagggaaaaacaaccagagtcagatgtcctttgaactctttctttgtcttttgcagttgtacctggttggctgccacatcggcgccatacagttcttttatgccggtaatgatagcaccggtaatctgttgttcgataaccatattcgtttagtatatgttcggatttattttgcctgcaaaggtacaggtttattttgtaaaaaccataagattggtgtgggtaggaaagagataactatgatttgataaagtaaccggcatgcaataaaaaaggcattccgattgcggagtgcctttttacttattgagagtgtaagactaatttacttgatgatttctgtcaatttggcgccagctttgaatttaactgatttgcgtgccgggatttcgattggttgtttagtcttcgggttaacacctttgcgtgcagatttttcagcaacagagaaagaaccaaaacctaaaagggccactttgccaccttcttttaattcactggatactgtttcaacaaaagcttctacagctttctttgcatcaactttgcttaaaccggatttttccgctacagcattgataaattctgttttgttcatgatggtttgataattaatatattaaacaatatttgtgatagcctaaaaagtcggtgtcaaatgtaattctattttgatatatcgcaaagaaaaaaagagttttttttattgatttactatgttttagtgctattttgtcagaaaactgccgaaatatatatacctttgtccttaaattgtaaatatatgatgaatcaaaatagttcgggattcctgagcagtatcccgatggttacgaaaaaccttatcattatcaacctgttgttttgggtagcgagtcttgttttacctaaagtagggattgatttagtccagttattcggactgcactttccgggtgtgaaggatttctatcctttccagtttgtgacttatatgttcatgcatgatacccattcgtttgcgcacgtgtttttcaatatgttcggtgtgtatatgttcggacgcgtgctggagaatgtctgggggccgaagcgcttcctgatcttttacatggtgacgggtatcggggcgggtattacgcaggaattggtttggctgtattccgtccattccttcgcaagtgcgaacggggttactctggtacagttggttgcaggagatccttcattgaactatctgattacgatcggtgcttctggttccgtgttcggtattttgctggcatttgccatgttgttcccgaatgttccgctgtacctgatgttcatccctattcctatcaaggcaaaatatttcgtgatcttttacggattggccgaattgtttatgggtgtcgctaacaacggtggtgattccgtggcgcattttgcccacctgggcggtatgcttttcggttatttcctggttcggtattggaaaaagaaagatatagacaatgggcgatatttttactaatctcaaacggactttcaattccggcaacatcctggcaaaactgatttatatcaatgtcgggctattcgtcattatacggttggcaagtgtgatcctgatgctgttcaatctgggcggttttccgtttttgcagtatttgcaagtgccttcgtctcccgaattgcttttgtaccggccgtggacgattattacttatatgttcacgcatttcgactttctgcatattctgtttaatatgctgtggttatactggttcggcggtttgttccttacttttttcagtgagcggcaattaggcggcctgtatctgttaggaggtattgccggggctgtcttgtttcttgtggcatacaacatattcccttatttccgtacagttgccgcttatagttatttgatgggagcgtcggcttcggttatggccattgtgtttgccgtctctttctaccggaaagacttggagatcggcttgttcctgatcgggaggatcaagctgatttatctggccctgtttacatttgtgatagacttgctggctattacatcgacgaatgccggtggtcatatcgcccatatcggcggggcgttgttcggcatctggtttgccgcccggatcaaggaaggcaaagatttgacggctcctatgaaccgcttacttgactgggtggtgaatctgggaaagcggaaacccaagatgcgtgtgacttataaacgtccggagaccgattatgaatataatgcccgtaaacatcgggaaacagtcgatctggatgcaatattggataaattaaaacgttccggttacgaaagcctttcggcagaagaaaagaaaaaactatttgatgccagcaaaaaatgagcgagcggtttaaagcgatcaggattctgtttaaatctgtagtcggtactgccaatgtgatagttattctgctattcattgcttcggccttctcggacagaatttcaccggacaggagtgtgttcttctcttatctggggttgggatttcctgtgttttgcgttttgaacctctgttttgttgtttattggctgtttctttgggaatggcggtttgtgttggtcggactatgttcgttcctgatctgccgggggcctgtaacccgttatttccctttccatgacagagtggacgatattccgaaagagaatgtactgaaagtcttgacttataatgtcatgggattcggttataaaggccatacggaagatgctccgaatccgatcatacggtatattgcgaattccggtgcggatatcgtatgtctgcaggaatatgcagtaggtacttccaagaactttttgacgaatcagaagatcgccaatgccttgaagatgtataggtatcgctccattattccgatcggaacctccggtacgctcaaattcaatatagccgtattttccaaatatccgatctccaaatcccgtaagatcaagtatgacagctctttcaacggctcgtccattcatgaactggatataagaggaaagaagttgactttgatcaataaccacttggagtctttcaagctgacgatggaggaccggagccattattccgcatttatcaagaatctgaattccgagacgctcgatggtttgagaagttccatcgaacagaagttggggcctgcattccggatacgtgcccgtcaggcgagagcggttgccgaagaaatcaaaaagatcgataccgattatgtattggtgtgcggtgacttcaacgatacgccgatttcctatgcccatcgtacgatccagggaccattgaaagatgcttatgctgcttcgggctgtggtgtcggggtcacctataatgaaaacttcttttggttcaggatcgacaacatcctgcattcagccaatatgaaaccgatcaactgcacggtcgacaaggtgcgttattccgaccattatccgttatggtgttatttgcaattgaaagagggggattgaaaatgaaaaattcccctatacaggaagccgtagtttctcgtataggggaatttttgtgccgtgcttatggagttagctctttatgctacagttccgcatcgttcactgcatccaggatgtcggcaaacaggttctcgacgaagaagaacgtggcattacaaaacagcttcggatccttgatcaaggcaactgtattgcttttgccattattggcgattacgctttctgccgaatacgtcttgaacttcttattgttctgtggatcgtattgataaacgatattgcttacttctgccgagtagcagttgtcgtggcaattgattttcatcttgtatttgatgatcgttttgtctgtatcgttcaacagcatctcgactttggaagaaacgttgatagtccctttggacttcttggagttgacattcgacaggaatatatctttcgcatagcttttcttcgcccattggttgattacttcgaatatctggtcctggctcatgtctttcacatggactgtgtcgcgatagcatactttcccgtttctcatcggggcacactcgtcgacttcgcctttatgcccctgtgccgttgccagcgcagggagcatgatcaatagaaggaaaaacagctttttcatcatcctatttcatccatacatttacgatttcaccgatgacggttatctgctggccttctgccgtttcgccctgcttgcggcagtcgatgatcagccaggcatccccgctttcacctttcttgaagaaagacaagctatatgtgtcattgttacctatttctttatagacaggactgtctttgctgatggcgatcgaggcaatcgatttgccgaacatattgcccgtgcctttccactgggcggatgtctcttttgtatccggcttaccggcggatacgacctgcatatcgctttccggtaacatctgtaataatgtagacggaaccttgtcggcggcaaaagccacatatccttcttttgccggaaccggagttgccggttgggtggtctgggctggtgtcacagtccgagcgggagtgaccggtgttgccggaactacgttggcggttgtctgcgtgcctaaagcggcggaggcggaggcaaacatttcgtcaatgaaatcgactgtctttctacggaatttgccgttgcctcggttcaatttggtttggtctttgttcaggcaatacttatctgtaatccattcttcggcggtgtatttttccggttcacgctggtacgatacattatattcgtaacggataccggccactttcactatacatttctggttctcgcattccatcgtgacgcgatagttcatttccgtacggtccagagaaagggcggtgctctggaagaccaggttggtttgccctactgcggcgatgtcgccttttgccttgtcggaatagacaacgcggttgccgtcttcactgaagaaaccgtccgcccagtccagcattttgtcatatacttcatctttcgaaaaagaaggtgcgtttatctcctttgcgaatactactttaccattctcgaccggaacggctccggctaaatacttggaatcttcctgagcccagagtagggccgggataaatagcgttaataataaaagttgcttcatggttattctttacttatgttttttacgggcaaagatatataattgtggctgaaataaactaagagtgtgacaaataaattaatctaattactgttggacaaagaaaaaaagcctatatttgcaccctgtgaaaaaacgaataataacataaacataagattcaaatgcaaaacaaaggatttgtaaaggtctttgcggtgttacttacgcttgtctgtatgttttatctgtcattctcgttcgtgacaagacattacaacagtaaagccgctgagtatgcaggtggagatccggtaaaagagagttcttatttggactcgttatctactcagaaggtatggttgggctatacgctcaaggagtgccgtgaaatggaaatcagtttagggcttgacttgaagggcggtatgaacgtcgttctggaattgaatgtggccgatgtgattcgctcgctttcgaacaacaatcaggacgagaacttcaataaagcattggacctggcttatgaaaatcaggctacaagtcagaaggactttattgatctatttgcagaagagtataagaagttagataatggcgcccgtttatccgctattttcagtactttcgaattgaaagacaaaatcactccgcagagctcggacgcacaggtaatcgccgtgttgaaggaagaactgaagagtgcaatcgataattcatttaacgtattgcgtacccgtatcgaccgtttcggcgtggtgtctccgaacatccagcgtttggaaactgccggtcgtattctggttgaacttccgggtgtgaaagaaccggaacgtgtgcgtaaattgttacagggtagtgccaacctcgaattttgggaaacatacaacttgccggaaatctaccagcagttggttgccgccgataatatgttggctacaatcctgaaatcggacgatactgctgctgtaggttcggatactacggctatcgaagcaacggaagaagtagttgccgacaatgctgctgccgaaacaaccaacgacgcagattctctgttggctaagatcggtgaagacaagcctgaagcacaggcagccaagagcatggaagaattcgcaaagcaacatccgttgttcgccgttctgcagatcaaccagtataacggacagttggctcccggaccggttgtcggtattgccgataagaaagatattgccaagatcaacgaatacttgaacatgaagcaggtaaaagatatcctgccgcgtaacctttctttgaaatggggcgtaaaggctatcgatgaaaaagaacaatatttctacttgtatgcaatcaagatgacgaaccgcgacggaacgcctgctttgggaggtgacgttgtaacggatgctaatgcagacttcgttcagcaggcaggccgttcagaacagcaggttagcatgactatgaacgcagaaggggctaaagcatgggctcgcctgacaaaagaaaatatcggtaaagcggttgctatcgttctcgacgatatggtttattcagctcctaacgtgcaggtggaaatcacaggcggacgttctcagatcacaggccacttcactccggaagaggcaaaggacttggctaacgtgttgaaatccggtaaaatggctgcttccgtacatatcgtacaggaagacgttgtcggcccgtctttgggtcaggaagctatcaattccggtgttatctcatttgttttggctttgatcctgttgatgttctacatgtgtgccttctacggagttcttccgggcttgatcgccgacggtgctttggtattgaacatctttttcacaatgggtatccttgcatccttccaggcagtccttacgttgccgggtattgccggtatggtgttgacgctgggtatggctgtcgatgccaacgtgttgatctacgaacgtacgaaagaggaacttcgtgccggtaaatcgttgaacaaagcaattgccgatggttacagcaacgcattttctgcaatcttcgactcgaacttgacttccatcatcactggtgtcgtattgttctatttcggtacgggtcctatccgtggttttgccacgacgatgattatcggtttgttcgcgtccttcctgacggcagtcttcctgactcgtatcgtctatgaagcattgctggctaaagataaactgaagaacgtgacctttacgacttctattacgaaagatttattgacgaatccgaagatcaacttcttggcagcccgtaaggttgggtatctgattccggccggtattatcgttttgggtgcgatctccatgtctactatcggtttgaacaacggtatcgatttcaccggtggacgtaactatgtgatccgtttcgcccaggatgtgaagactgacgaagtccgtaatctgttggatgcgcagttggatggttctgttagcgttatccagatcggtactcccgaccaggttcgtgtatctaccaactataagattgaagacaatgatccggctatcgaccaggaaatcgaaaataaattgtttgaaggtgtcaagtcattgcttccggaaggaacgactttggctcagttcacggatcagtatatccagagctcacagaaggtaggaccgagtatggctgacgatatcaagaacgctgcgtttctcgcagttgtatttgccatgttctgtatggcggcttatatcttgcttcgtttccgcgacatctcattctctgtcggtgcattcgcttctgtagctgtcacgactttgtgtattatttcattctacacattgctttggaaggtattgccgttctctatggaagtcgaccagacctttatcgcggctatcctgaccatcatcggttactctatcaacgataccgtggttgtgttcgaccgtatccgtgaaacgatcggtctgtatccgaagcgtgatcgttatcaggtgatcaacgatgcattgaactcgactttatcccgtaccttcaatacatcattaactacattggtagttgtattgtgtatcttcatcctgggtggtgcgacgatccgtagctttacgttcgctatcttgttaggtatcattatcggtacatattctactctgttcgtggcaactcctatcgcttacgaattgcagaagaagaagatcaataagaaagcagctgctgaagctggtaaataagaatagattttaatccgatagaaaagggctgttcctggttaagggaatggccctttttgtgcttctaaacataattgtgccggttggcaagatgaaagagaatgcttatcttgtacgcctcttacttctgctatttacttacagattgtaagaaaacaccttaaaatatcatgttatggaagtacgcctaagtaaccaattgccggtttacccatcttttgttcccggtatccgccgcgctcctgatcgcggctattcacttacgcctgcacaaacagaaacggccttgaagaatgcgctccgttacattcccgaagagttgcatgaagtgctggctccggagtttatggaagagttgatgactcgcggccgcatttacggataccgttaccggccggaaggagacttgaaagctaagccggtcgaccaatataaagggcaatgtctggagggaaaggcttttcaggtgatgatcgacaacaatctcagtttcgatatcgctctctatccatacgaactggtcacgtatggcgaaaccgggcaggtttgccagaactggatgcagtatcgcctgatcaagcaatatctcgaaatactgacgagcgagcagacactcgtgatcgagtccggacatccgttgggactgttccgttccaagccggatgcaccccgtgtgattattaccaattccatgatggtcggcttgttcgacaatcagaaagactggcatatagccgcccagatgggtgtcgctaattacggacagatgaccgccggcggctggatgtatatcggtccgcaggggatcgtgcacgggacgttcaataccttattgaatgccgggcggaagaaattaggcattccgcaggatcaggatttgcgtgggcatctctttgtctcctccggtctcggaggaatgagtggggcacaaccgaaagcggccgttatagccggtgctgccagtatcattgcagaagtggacagttcccgcatccagacccgccattcgcaaggttgggttcagcatgtgactgaagataaagcagaggcattccgtatggcgcaggaggctatgcaggtaagggaaccgatttcgatcgcttatcatggcaatatagtagacttgttagagtatgccgagacgcaggtgatccggatcgatctgctgagtgaccaaacttcctgtcatgccgtctatgaaggtggttactgtcctgtcggcatctcctttgccgagcgtacggaacttctttctcacgatatggaccggttctgctcgttggtcgatcagtccctgcaccgtcatttcgaggtaatcaagaagcttgtggctcgcggcacttacttcttcgactacggaaactcgtttatgaaagccatctacgatgccggtgtaaaggaaatttcccggaacggagtcgatgagaaagacggtttcatctggccttcctatgtcgaggacattatggggccggaacttttcgactatggttacgggcctttccgctgggtatgtctgagtgggaaacatgaagatctggtaaagaccgaccaagcagctatggattgcatcgatccgaaccggcgcgggcaggacagggataactacaactggattcgcgatgccgagacaaaccggcttgttgtcggtaccgaggcgcgcattctctaccaggatgcggaaggaagattgaatatcgcgctccgcttcaaccgcatggtgcgaaacggtgaagtcgggccgatcatgctcggacgtgaccatcatgatgtgagcgggacggattcgcctttccgcgaaacgtccaatattcatgacggaagtaacgtcatggctgatatggctgtccagtgttttgccggaaatgcggcacggggtatgagccttgttgcccttcataatggcggcggagtcggtatcgggaaagcggtaaacggtggtttcggtatggtgctggatggaagcgaacgggtggacgaaatccttcgttccgccatgctctgggatgtgatgggaggagtggcacgccgttcctgggcccggaatccgaatgccatgtccaccagcgcggcctttaacgaaagctatggcgattggtatcatatcacgttgccttttattccgaaagaagatttaattcaaaatagtatacgtacctctttaaaacgcaaagtatgagtacatggaataagataatggaatgtgtccccaatttcagtgagggaagggatttagcgaaaatagaaaagatagtagataaatttcgtgccaaagccggtgtaaaactgttagattacagtaatgacgaagatcataaccgactggtcgtgacggtagtcggtgaaccggaagccttgaaagacgcgctgctcgaagctatcgggcaggcagtggaactgatagacctcacgaaacactccgggcagcatcctcggatgggagcggtcgatgtcgttccttttatcccgatcaaagggtgcacgatggatgaggcgattgcgctctccaaagaagtgggcgagaaggtggctgctctctatcgagtgccggtcttcctgtatgaaaagtcggcttcggctccacaccgagaaaacttggcggcgatccgcaaaggagagtttgagggtatggaagcaaagatcaagcagccggaatggaaacctgacttcgggcctgccgaacggcatccgtcggcagggacagtggcgatcggcgcccgtatgccgctggtggcttataacgtcaatttgggcacggcgaacctggagatcgcgagcagtatcgccaaaaagatccgcttcataggtggcgggctccgctactgcaaagcgatgggagtggaactgaaagaacgcggcatcgtgcaggtttcgatcaatatgaccgattatacccgcaccgccctttatcgcgctttcgagctggtacgcattgaggcacgtcgctatggtgtcccagtcgtcggaagcgagatcatcggcttggttccgatggaagctttgatcgacacggcttcttattatttgggactggaagacttttcaatggatcaggtgctggaagccagaataatggaatagactatggaagaagaaaagatattgatacggaatgcatcccaggtggtgacttgttccggcttcgaggcgaagaaaggagaggcaatgtccgatgtcggtgtgatcgaggacggagcggttgccgtttcgaatggtattattacgcatgtgggaccgaccgaagaagtccttcggcaagtggatgttgcggactatctggaggtaaacgcttccgggcgcgcgcttcttcccgggtttgtggatagccatacgcacttcgtcttcggcggttaccgcgaggaggagttctcctggcggatgaaaggagacagctatatgtcgatcatggaaaggggaggcgggatcgtcaatacgatgaatgcgacccggaacgccagctatgacgatctgtacggcgatgcatacgaccgtctcgacacaatgatggatatgggcgtgactactgtcgaaggaaagagtggttacggtcttgacttggcgaccgagctgatccagctccgtatcatgaaggagttgaacgatgaacacccgttggatgtggtctctactttcctcggtgcgcatgctgtcccgccggagtttgccgggcgtacggacgcatatgtcgattacataatagaaggagtgttgccccatgtacgtgcggaacattcggtaaccttctgcgatgtcttttgcgaacaaggcgttttctcggtcgaacaaagcgaacgtctgttgaaagcagcccgcagccagcgtttcaaacttaaacttcatgctgatgagatcgtttctttcggaggagccgaattggcagcccgcctgaaagccgtgagtgccgatcatctgttgcatatctccgataccggcatcaaacgcctggcacgttcggggacgatcgcgactttgcttccgcttaccgctttctcactaaatgaaccttatgctccgggacgccggatgatagatgccggttgcgctgtggcactggcttccgacctgaaccccggtagttgcttctccagttcgatcccgttgttgttcgccctggcctgcatccagatgaaacttactcccgaagaagccctgaccgctcttacgatcaacggagcggcagcattaggccgggaaaagaagatcggtagcatcgatgtcggaaagaaggcggacttggtcttgttgaaattcccttcttataagttccttccttatcatataggaatgaatatcgtggacacggttatcaaagacggcgtgctttatatcgtttgacgggatgaagataaaatgtttaatcttaaataatagacacaatgcttgtagatttgacaatcaaaggatttcttgccgaaacggcgggtagcgcgcctgttccggggggcggaagtatctcggctctgaacggggctattgcgacggcacttaccgagatggtggcaaacctgacgatcggtaagaagaaatatgccgatgtggaaggccagatgcggacaatcgcgacggaggcagccatcattcgtgaacggctgatccgggatatagaccgcgacagcgaagcgtacgaccgtgtgtttgccgcctttaaactcccgaaggaaacggaggaggaaaaagccgagcgcagccgggtgatccaggacgcgacgaaacaggcggctatggtcccgatggaagtggccgaagagattgcctcggtgatggagactattatatatgtggcgcataaaggaaaccggaatgccgtgaccgatgcctgtgtggcgatgatgacggcccgtacttgtgtgttaggggctttgctgaatgtccgtatcaatcttatatccataaaggatgaagcgtttgtcaaacggatgtcggagaaagcggatttcctcgaatccgaagcgatccggatagagaagaagttgctggattggacgcatgagcaattgaaagttgaaaattgaaagttatgggaaatgtacattatgtgggggcggaaccgctgacgttcgaacgtatcgaagagatattgaccggaaatatgaagttagaactgaccccggaagtgaaggaacgcatccagcgttgccgcgattatctggaccggaagatcgagacacagagcgagccgctttacggcatcacgacaggctttggttccttgtgtaataagaatatctcgccggatgaactcagcaccttgcaggagaatctggtgaaaagccatgcctgtagcgtgggggatgaggtgagcccggtgattgtccgcctgatgatgctgttgaaggcgcatgctttgtcgctggggcatagcggcgtgcaggtgataacggtgcagcgtatccttgatttctttaataatgacgtgctcccgatcgtctatgaccggggttcgcttggggcgtcgggcgacctggctccgttggcgaatcttttccttccgcttatcggagtgggagatgtgtattataaagggaagaagagggaggctatcagtgtcctggacgagtttgcctggaagccggtgcgcctgatgagtaaagagggattggcgttgctgaacggtacgcagtttatgagtgccaacggcgtgtttgccctgatgcgtgcttttgccgtgtcgaagcgggcggatctgattgcagccttgtcgctcgaagccttcgacgggcggatcgatccttttatggattgcatccagcagatgcgtccgcatcccggacagatcgagacgggtgatgctttccgccgcattctggagggcagcgaactgatcaaccggaagaaggagcatgtgcaggacccgtattcgttccgttgcatcccgcaggtacacggggcgacgaaagatgcgatccggtatgtctctggcgtattgcttaccgagatcaattccgtgacggacaacccgacgatcttccccgacgaagacaagatcatctccggaggtaatttccatggccagccgttggcgatctcctacgatttccttgcgattgcgttggctgagttgggaaatatttccgaacgccgtgtcgcgcagttgatcatgggccttcggggattgcctgaatttctggttgccaatcccggactgaattccggttttatgatcccgcaatatgcggcagccagcatggtgagccagaacaagatgtactgttatgccgccagcagcgactcgatcgtgtccagcaacgggcaggaagaccatgtgagtatgggggccaatgcagcgacgaagctctttaagataatggacaacttggatcatatcctggcgatcgagctgatgaatgcggcacaaggtatcgagttccgccgtccggcgcgtacttcccctatcttggagaaattcctgaaagcctatcgcaaagaggttcccttcattggtgaggacatcatcatgtatcccgaaatacatcggacggtcgctttcctaagacggtatactttataataataagaagataggattgtgtccaatttcttggtgatgtgtcaaaatttatctctctcttttgccgggggattaatcccccggcaagggattgatttctctttctttttgacacatcctacttactctcttattactttttggtaacaacaaccctctttgtcggatccaagtgttcgttacggtaatcgatctgtttcacgacattttcggctaacttctggaatgcctggccagtgatgctgtccggattgagggcgactggctttccgctgtctccaccttcgcagatgctttgtacgatggggatttgtcctagcaacgggatattcagttcttccgccagacgtttgcctccttctttgccgaacaggtagtatttgttttctggcagctcggcaggcgtgaaccaggacatgttctcgaccagtcccaatactggtacgttgatcttctcacctgtaaacatactgattcctttgcgggcatctgccaacgccacttcttgcggtgtgctgacaacgatggcgccggtgatggccaatgtctgtaccatcgtcaggtggatatcgcttgttcccggtggcaggtcgatcaggaaatagtccagatctccccagttggcgtcgccgatcaactgtttcaaggcattgcttgccattgcgccgcgccaaaggacggcgtcttccttattgacaaagaaaccgatggacagtagcttcacgccgtagttggcagccggttcgatcagttcgcgacctcccacctccaccatatagggacgggcttcttctacattgaacatcttaggctgcgaaggaccgaagatatcggcatccagcaaaccgaccttgtgaccctgcaaagccagcgctaccgccaagttggccgctactgtacttttgcctacgccacccttgccggaagatacggcgatgatattttttacctccggcagcagcttgtctggttcaggacgggccgcctgcttggcgtcaaccgtgatattacccttgatgtccacttcttctcctacgtaagtaaggatagccgtctcggcagcttttaccaccgatttgataaacggatcgttcggtttttcgaaaaggagcgagaagcttactttgttaccgtcgatccggatattatcttctaccatacccattgtcacaaggtcttttcctgtgccggggtaacgcacctttgccagtgcgtccatgattagctttggatagagtgtcatgatgtatgatttataatttatgatttatgaattatttgccggaagccaacgcactccgtttgctccggttgaaactgcgatacggatcgtattcgatttccacttccggttctaccagttcatcccgttcttcacagacaaacttgatgtatttgatggttaacccgcggtccaaccactgctgttcataataggtcttgatagaaagaatgttgtctgtcagccccgaatgatacaaatcgtcgttgctgaacagtacgggatagcgatttgcttttaccatctcgcaggtgtaggtgtacatgaagttgctgtctgttttcagatgtatgatgccatctcccgccagtatctcgcggtacatcttcatgaagcgagtggaggtaaggcgcttgttcgctttcttcatctgcgggtcagggaaggtgagccagatctcggccacctctccggcagcaaagaaatgggcgatcagttcgatactggtcctgaggaaggcaacgttcgtcatacctgcctcaagcgattctttcgcccctgtccacatacgggctcccttgatatcgactcctataaaatttttgttgggaaataactttcccaaacctaccgtatattctccttttccgcagcctaattcaagcacgatcggattgtcgttcttaaagaactgttcgtgccagtgcccctttagctcgaatcctttctcttgaagggttgcaaacggatattggaacacatggggatagctcgccatgtcgtcaaactttgctaatttattctttcccataatgcaaaggtaatataattacacgtaaaaagactataacctgccaggcaattattcgatcaggttatcgtcccaatcatgcataaaaaaagagatactcttgtgaagtatctctctctttcgctcttcctcttggacttgaaccaaggaccctctgattaacagtcagatgctctaaccaactgagctaaggaagaatatgtctttttcagtctttcccgatgtcttttcgctcttcctcttggacttgaaccaaggaccctctgattaacagtcagatgctctaaccaactgagctaaggaagaatatgtctttttcagtctttcccgatgtcttttgctcttcctcttggacttgaaccaaggaccctctgattaacagtcagatgctctaaccaactgagctaaggaagaatttatttctttcagttcgggacttattaatccctttctgaatttgcactgcaaaagtagaggttctttttgaaatatgcaatatctttgcgaaaaaaaatagaaaaaatgaatacgattggattaggaaacgctttggtagacgttctgctgaagcttgagaacgatgatgtactggcggaagtaggcatacagaaaggcgcaatggatatgatcaaccaggagcagatgattaaaatccgtaaatcgcaggaaggccttgaacgcagtcaggcaccgggaggttcagtatgcaataccatgcgtgcgatggctattttgggagcaaaagcaggatttataggtaagatcggatccgattctgtaggtgagtattatgaagaggctttgaaaaaagcgaatgtctctccctattttgccaagacagacggtatttccggtagctgcacagttctgatttctcccgatggcgagcgtacgatgggaaccttcctcggaccggccccgacgatcacgccggatgagataacggaagagatgctttccgcttaccaatgtatttatatcgaaggctatctgttggtgaacgaagaactggtgcgcactactatgcagaaagcgaaaaagttaggattgaaggttgccctcgatctatctaacttcaatatcgtgaatgctttccgggggctattagacgatattatccctgaatatgtcgatatccttttctccaacgaaagcgaagcggaagcctttaccgggctgaaagcacacgaagcggtcaaggtcctttcagaacaggtagagatttctttagtcactttaggaaaagaaggcgctctggtgggaagcaagggacaggttatcgctgttccggcggaaggcggcaaaccggtcgacacgacgggagccggcgaccactttgctgccggattcctttacgggcagtcggtcggcgcgactttggagcagtcggcacgtatcggatcgcttttggccggttacataattgatgtcatcggggcgcagataccggatgataaatgggaacaaataaagttaaaagtaaatagtatattgtcctgacaagcgtttattatatacatttacgtcgttaattaactaaatattctatgtataaacaacgagagaaaataatagttctttttagtttgctgcttctgttaggaggcgtgattcccggacaggcgcagaaagacaatcgtttcgaggtcagtaagaacctggatatctttaacgctctggtaaaagaggtggaaatgttttatgtggattcggtcgacgtcgagaaaacggtgcgtcggggtatcgatgccatgttaggcggcttggacccttataccgaatactatccggagcaggaaatggataaactgaaattcatgacgaccggcgaatatggcggtatcggttcttatatccgtgaacggaaagaaggcggtgtctatattattgagccgtttgaagggatgccggctgctttggcaggattgaaagcgggcgaccgcattctggctatcgatacggtggatgtgaccgacaaatcttcggatgaggtgagtgccttgttgaaaggtgtccccaatacgaaaatggtattgaagatacagagtccgtatgacaagaaaccgcgtgaagtggaactggtgcgtaggcagattttggaaaatcaggttacttattatggtgtgcgtggtgatagcgtaggctatatctatttgaagggttttacagataagagtgcgcaggaagtaaaaaatgcgtttgaagacttgaaaaagaaccatcatataaaatcactgattctggacttgcgtaacaatggcggcggtttgttggaaagcgctacgcaaatagtcggtatgttcgtcccgaaggggaaagaagtggtttcgacaaaagggaagatcagccagtgggaccgcacttaccggacaccgggcgaacctctcgacacggtgatgccgatggctgtccttattaatggagcctctgcttctgctgccgagatcgtttcgggctctttacaggatatggaccgtgctgtgttgattggacagcgttctttcggaaagggacttgtgcagtctccccgtgaacttccttataatggaagtgtgaaagtgacgatgagcaaatattatatccctagcggccgttgtatccagcagatggactattcgcaccggaaagctgatggtagcgtcggggctattccagatagcctgacgtctgtattctatacttccaaaggacgtcccgttcgggatggaggcggtattacccctgactttaaaatagaagaaccggaaacaccgactatgatgttctatttggtgacagactttctcttgacggactttgtcgccgaatggtcccagaaacataagaaaatcgcttcgcccgaagacttcgaggtgacggatgaagattttgaggctttcaagcaatatgctaaagaaaagaacttcacctatgaccggcagagtgaaaagctgttgaagaacttgaaagaagtggctaagtttgaaggttacatggataatgattctaccctcttcaactctttggaagctaaactgactccggacttggatcgggatttcgaccgcaacaaggatcagatcaagaaactgttgacttccgagattatgaaacgttattatttccagaaaggcgagttgataaacagcttgaaggaagatgatgttttggataaggcgctagaagtgttgggtgatccagcattataccagcagacattggaagcgccgggaaaggtagagaaaacggctacattataatcgaggtaagagacttgccatgaagagtgctttgaagttgcttgtgtttttgggcatcggatgtttgatcggcattgttttggtgtgtgccggtatcgtgtcgtttacggatatgacatggaatgaactggtgcagaagctggccaagatagaggcgcttgaggtggtgggaatatttgccgggagcatcgtttgtacgttggtcgcttttattttgcaaattgttttgcatgaaggaggccatttgcttttcgggctgctctccggctatcgtttcgtctctttccgtattttcaattggacgctgatccgtcaagaagggaaattccgtttgaagcgtttcggcatcgcggggacaggtggacaatgcctgatgctcccgcctgacaagcctttggaagagatccctgttgtgctttaccattggggaggcgttattgtcaatatgtcggtagcgcttttggcttttgtggtttggtatgtggtggaagatccttctcttctgctggcacaattcctggttatgatgtgttttgccggtgtgtcgttgggattgctcaatggcatcccgttcaagcggggaattactaatgatgcagccaatgtacgtttgatgaggaagtacccgaagagtaaaaaggcgatgatagtccagctgcgcgtcaatgcctgtatacaagaaggtatccggataaaggatatgccggaagagtggtttgcttgggtggatgacattgattacggggaaccgatgcaactgaatatccgtttgctgcaagtaggacgactgctggatttagggcaaatggaagaggcctatgttgcattggaagagattgcaagacacaagggggagatgatcgggcttttggcgaaagaggtggtttgcgaactcatctatttggatctggtgactgggcataaccgatgggcagatacgttgtacacgaaagaaatagaactttacgtccggcaataccgtgttttgatgtcctcaaaacagcgttttctctgtgcttgggcactttataaggagcgagatcgggagaaagcgttggcaatctataaaaatgtagtccaaaagcaaactcaatatctgttgcagggggaagtgaagatggatatcgccatgatggaggcaatgtttcatcctgcttaattggcaaaccggatgtgcagcacgatcatttctgatacagtaccgacccggtagggaggtccggctatcccgatgccggaagatacatagaactggaccggccctttcttatggtagccatacggacattcatagatcaatttcattacgagggggtaaggccatagctgtccgttatgggtatgtccgtggagtccgagatccacaccgttcattgtcatttcggcgaacgaccagggttgatgatccaatacgatgatcggtttggttgtgtctatgcctgccatgagtacatgtaacggctttcttttcttgttgatatggtcgtcccgtccgatcagatagaatgaagagtccggacgtgcaacggaatcgatcagaagcgtcgcccctgttttcttcagccaacggtatttggctatgcggttggcgcgatactcatggttgccataaaccacatacacgcctaatggggctttcagttgtttcaaatcctcttcgatatgtgctttttcggcaaagcgtgattcataatccatgatatcgcctactaggacgaccaggtcgggatgttgtgcgttgctcatcttcacgtatcgctgtaccagttccttaccgatcatttctccgatatggaggtcgctcatcatgacaatcgtcatgctgtcacggtcgctacttcctttgggtagggtgacatatacatctttgacaaccggataggcgacgacatggtaagcatgaaacatcaggccggtaacgattgccatgactaaaaagaacaggaccagtttcgtttgtttccagtggctcgtaatccagccgggaaaccaatggaagaaacggttgctaagccggagcacttccagacccaatagggatagcgtgatataaatagatgcgatataccaggtgttacagatatattggatggcaatcatgacagagtccggcaatacattgcggaacgtaaatccgaaaaagaagattgataattcaaggataaaaaacaagatataaggaattctccaactctttttggggggaattgcctgataccctcgccagaagatataaggatttagtaatatctgtgctactatcgattgaatgaaaactttcatgtctgcaaactatttacaggtaatgttgaatacgacaagctcgctgtcggtacctatcctgaaaggcggtccccaaagcgatagtccggaggaaacgtatatgtggctgtttccccacttacggtaaccataactttgatcgaacagatggtcggtaatgagactgaccggccatacctgtccacgatgcgtatgtccgctgaactgaaggtcgatacccgcattttccgtatccgacaagttgtacggttgatgatccaaaaggataacaggttttgccggatcaatgtttttcaccagttcttgcagggataaccgggatttattgctgcggtcgtcccgtccgattatttgtataccgccaggcaatgttacgacatcgtctctcaataggcggatcggcgtttcatttatgaattgcatacttttccgtatgccgctgatgtattcatgatttcctggaaccatatagattcccaaaggtgctttcaattcagccagttcctccatcatcttttcttcataaaggggaactacgctgttgtcgatcaagtcgccgcctatcaggatcagatccggttgctgcgcgttgatcatctcgacatattgtttgagttcttccttgtctgtcccgtaccctaaatgaacgtcgctgacggaaacgactttcaacggctgttcattatgaaccgtctgcttgttgataactatgttgaaaacttctgttttcggatgttggtagttatagtatccatagcttaataggctaagtgtcagaaataaggatatatagaaaccatatttgcatggaaagttgaaaagtcggaataaatcgaatatgattaggcataataccatataaagcgtgaaaactaaccagccggtccctatctcgtgggctgtatgagacaaaacaaccggcaatttggtgtttcgtgctaaaaaactaccgataaacgccaaggcaccgcaccagaatagtacggctaataaaactttaacaccgaaaggctgagctaccaaagcctgtgcccctctcctgaatatatagatgtttcccgcaagataaatactgatgaggacaacgaaaaatgtcggcatagttgtaaattttcggcaaaagtacggaaacaaatttagttatggtcgtatttgatatgaaatttctccagcaaaaccttgaaatgatcctgtgccgtcaggcaggtatcggccagatatcctttgatgtgcggccagtgccgtaagccgttgtagtagaacatttcttttcgttcttcagatgtaccggatttcaaaataaagtggagttgtttgatgtacgtttcggtaagtttgccgttgttctcttggataatgtagtctacggcgcggaaatggttggtggtttcgatgatgtcgtctacattaatcgcttcatccgtcactccgatcgtgttggttttccatctatcggcaagtttgatagtgacattatatctacaaaggtagtatttcttgctgatatcggcaagaaatactaccatatactgcatttaccgttatggaattacaatttgaaactactcggtttgatattccaacctttcacaacgaatgtcggttcggatggcatatcgcttgcggctgtttctatgatgacggttttactttctcccggtaagagcgagaagaagttgtctgtgtagaaactggggcgcaccggctttttgtcctgaccaagcaattgaagctgggtgaagaatgctacggttgaagaagggttctttatttcagctttaatgaaatgccgatcaccttcttgataagtttggtagcgagtcttcagttgcacctgtttcaatttcgacagatcttcgaagccggatgaggtcgggcctgttaaggtcttgcgtccttcatacttgtcgttggaacgccagtagaatgtattggcgacttctttccctttcgtgtcgaacaggcgtagttttatgaaatggacctgcgtgatgttttggggaaaatcgattgtgaagatatcgattacgacaccgtcttccgggatatcgatcttctggcttttgccccatacctttttgctgttcaggtcgtacacttcggcagttactttatagtccttgaatgcctggtagtagtcattataaacagaaaccgtatttttcaagtaatcaaactgtgcgtgaagcggttccaatgcgttctgagtatgatataaagaggcggttggttccaaagagtagtcccacatacgggcgcaaacctgactgactgggcagttgtgataccagaacaataaccctgatgcgtagcggtctccataaccgaatttgttatagttccagacttcccagatcgattttgagttcatcgcaccgaccgcctgacctttggtggcaaactcttcgatggaagaggaagggccataatggttggtaaggtccgtgtacatggtcgacatcagatggaatcctccgccatcatgataatcccatacctccttattgatcggccagaggtctttctcgtccattacttcgcggagtgtttcgactgtcgggatagtgggcgaaccatattccgggttgaagccatcgacacggctaccgcgttcggatgccgtattctcgtaatgctgcatcgggtttacctgtttgtaagggctgccgtcgtgcacgccgtcacattccgactgcatttggtaaccgcgtgtcccgtccagtttcatgatcaggtcttttgctcctggcatttccgtgctttcattagacgaaacatagtaggccagtgaaggatggttgcgcaggcgttttacggttgcctcgacgttgctcaggtatagatctttatcctgcggatgtttggtgtctccggtcatccagaattcctgccagacaaggagtcccatttcgtcgcatagctggaagaaatagtccgattcggcaatgccgccgccccacatgcggatcaggttgataccggattgttttgtatagcgcaattcagcataagtacgttcgtcggaggtacggagcatcccttccggaatccagttggttccccggatgaaaagtttcttgccgttcacatagaattggcgggatttgtccggtgtattctggtcggatgtgatttcccggataccgaaacgggtttttgtttcatcggacactttaccgtctatgcttacggtcagtttcagttcgtacagttccggattccctttgaagatcggccaccacagacgtgggttcttgattgtcagttgtgggaattcttccggagtaaaacaaatttcctttgtttctcctctgaataggttcaggtctttgctgaacgtgatgttttcgccgatgatttctcctttgaccgtgcattttatgccacgctgtgtcgggtttgtcacttctacgctgacagtttcttttgccaggtcgtagttgggttttgaaagttcggatttgatgaacggatggcggataactgctttatctgtggcatagagactgatgtttttccagatgccggtattacggtcgcggatgccgtcgttgaaggtgaaatcccaaccgacactcatcagcatggttgtgttcagtccgatgttaccgtctccaccattgtgaaactcgccggcagctccccactgcttcggtttgatggttcccggcatatcgaccggataaaccttgattgccaaggcattcttctgaccgatacgggcgaagtcggtgatattgatatactccggtttgaacatgccggacatattgccaagtagataaccgtttacccatatttcggcacgataattgataccgtctacctgaagccagacgattttgtctttatagttttccggtacgtcaaattccgtgcggaaccaataggtgtagaactcgcgtcctgttttggcaagatctgggatgatattccggtctaacttgttgttcatgccataataaggctccggatacaccttgttgtggacaagggaattcaggaccgtacccggaacgattgccggcatccattttccggtctgatagcctggttgtgagattttttcagccggatctttcgtctcgtcggccttatgcatctgccaggtaaaacttccgttatgtccttctttcgaatccagatatattttatccgggtttcggtaataattgggtgtctgagcttgcatgaagcaggcagacacaagtaaaaatattcctgtaaaaatgtttttcataaattattcttttaattcgggatctgatcgccaggagttttcttggccggatcgtaaatagctacgctgacctgagaatctgcacatccgtaatagagataccatttgtttttgaaaaagaccaaaccttcgataaagacggttccgtcgacatactgtccgctcttttcgaatgaagccatcggacggaagaaaggaacgtccagacgttgcagaaccttcatcggttccttcggatcggtcagaatctgtccggcacagtaagctccggctgtgaaacgcttgtcgcgcttgctgtcgtttgtctggttcttgccgttataaagcaagacgatacctttgtctgtcaggatagcgggaggaccacactctgtcaaggcgctgtcgaaatattggggacggggtttgatgacagtcgccagttcatttttttcgtccaatatcggtgtccagttgaccaaatcgtcggaggttgctgcgtagaccgcatgttccccccaatacatgaagtattttccatcgattttcgtcagcacttgtttcccgtctttgatcgttgtcaccatggaaccggatttgcagaaaatgtctttgaaacgtccgttgtaggctttagcaaaagcaggtccatgtttttcccatttgaccaggtcatgtgaggtggcgatgcagaggcgtgccactttccggttccaggaagtgtaggccatgacatacagaccgtcttccgtcattgtcacacgtgggtcttcgcaaccgccttcccattcgtattccttcatattatctttgtccgggtacatgacgggggtcttccggcgtttcatgtggataccgtcttcggattctgctaatccgatacgcgaagtacgtttgccgattcctgttgcagaattgtcctcagcccggtaaaggacatatattttaccgtcttttacggttgctgcgggattaaacacatcgctctcttcccatcctatttttttgtcctgcatgggacagtcgaattgattggaaggattgggggtaatgatcggattggctttttccggtctgacaaagccgcctaaagcccagtccggtaatacattttggctatacccgaataggggtagaactgccagactgatgagtaagatactttttttcatgctctaaagaataaaaaaggcacagagatccaaacaaaaaggatatctgtgccaaaggttatttattgtacaatcgtttctataatggtactgtagttgactgcgccttctgttttagcaccgacacgtacatatattttgttgccatttgcttgtattttgtacagattgtcctgataggttttatcgttttccagatcgaaaacgatcgtcccttcctgctccttaacggtctgctttcctgcttggttggcatttccattatcaacacccggagcaaaattccagtagccgtacacttcggataccttgaaattgctgtttgtcggattcaccttgtatgtaatcgtgatttttttacccgtaacctgggccgaagcgttgattcttgcatacggagttgctttcagatccaatgttgtctgtccttttacggttacaaattcttcgcaaggagaaacaaacggaccgtttacaacaattttataatcacagttgaacaactttgcattttcgtatgaaccatccatctttgcatagaaattgaccgattgtgttgcatctgtgttctgttcgaacatattaataataacaccggtagatccttggacaggcagtggtatcggttcattcgtttccgcatctaagatttgtcctttgatgcctccgttgggggattcataattatccatatcgctcaaacaacttgtgaagcataatgagcaaacggccatcagtaataaacttatctttttcatatcaaatttctaaattatatgattaattggtatagcccgggttctgaatgagattcggatttgaattcatatcgtcttggttgatttttgtataataatttttttccaagaagattcgtaattgtttaggggtgttacgtcctctttcaaatacatatttaccatcacgaatatcataccaaggatacaaagccgttcctctgaatccattcagcccgccttgtgtcacatccaagtgagcaattctccaacgcttcatgtcccagaagcgatggccttcgaatgccagttccactctgcgttcgtggcggatcttttccatattgatgtttgacaataaggcaattccggcacgttcgcggatcttgttaactgcatccaaagcttcggatgatttgttcaactccattgcagcttccgccaaatttagataaatttctcctaaacggaaaaccggccacggagtttctgacttacccatattcatatcggtcaatgtttcgtcccagaatttcttctgatagaagcctgttttggaggcatctccggcatcggatccaccatcttttccagatgtactataggtgactccgttgatttcaaccgtattaccaccatccggctggctggttgctacatgtctcttattatcgttttcgatgacacctcttttccattcgatctttgtgctttggcaaggagagccgggcagatatacggatgcgaacaagcgtgggtctttattggcaaatacttcgtatggatcatcgaaacgaagaggtttgccgttttcttccaacttcagagttcctttggaaccgtctacatattcatatgcttccaccaattcaagtgtcggggcgataccgcatccccaaccaccggcacgataagagaacggtgcgttacgtttgtcccagtcgtgacctttgcctcctgcaacgttatattgcttctggaagatatattctccgttatcaccgttacctttcaggaacatatcacaaaagttctgtgctttgttgtcaggcttgttgttatacaaggcatatttgccagaagtaatgattgctttagatgcctcgtaagatgtttggaaaaagcgatcggcttcggaagcggggatacctacaagtccttcttgctggaccgttccgtagcgggcaatggaaccggcatacaaagcagctcgtgaacataaagataatgcaacatatctatttgctctgtatttggcttctgcctctcttgtttcgggaagatcttgtgcggcttcttggcattcttttacgataaaatcataaatttcaacttctttgttgcgaggaaccatcagagcttccaaattgttgggatcatactgctgcggttcatcgataagaggtacacctccgtatcgcttaactaatgtgaaatagtgcatggcacgtaagaaacgggattcggctaacagcagtttcttttcagaatccgataaggccgttgcttcctgtaattggtagataaagtcgttgcaatttcgtatattcttgtatcgatcggagaatttctgttcgaacaacgcgtcttcgtatgtgtatgtcgcatttccgttatcgaaaagaggatctttttggaaagaaccttgcgcttcgtcagacatggaagaggcgttttgtaaacgccatgcatcacgataccagtaattgaaatcttctaagttcagaccgtcatataaattaaccattacaccgttgatcaatttagggtcttgccaaacctgttcaggagtgatgatgtcgaaagattctttatcaaggtagtcggcacatgctgtcgtacctaacaaaagtaatccgcatccgatattttttatgattgttgtcttcatcatttctttttttagaatgttagattaacaccgaaattaaatgttttcatttgcgggtaatagcggaacatgctttcgctattttccgggtccatatatttcatgatacctgtgcggcttgttattgttgcagtattgaaactgtttacataaacacgcaggttttcaatgccggccctttgcatccattttttagggaaggtatatccgatttcgatagttttcagacgtaaataattagctttttgtctggtccatgtatttttgctggcatttgctgaaaagcctgtaggacgaagagcgggcatatacccaggaatccattcgctactcatgtcggaaggatcttctcgatgccaacgatccaggttcagagtaataccatttccaagaccttgctggatgaatggagccataaagtcaccagttgtgaaaacctcatgtccggctgcaccttggaagaatacagtcaaatcgaagcctttgtactctccgtaaagattcaatccataatacatacgaggtgtattgccgaatccgataggttgatcgtctttaccgtctatgataccatcattattccaatcttcgaatttcaagtcaccaggcattagggatttatttccattgttgtcctgtactggtgaattcagtatttcttcgtaactttgaaattgtccgatgcagactttaccccattgaatatctttataacgatcgttactgttatttctccaattgtcatacatattggctgaagccgcacgttctacatggcgattataattacgtgttgtagaaaaattcgcttttacatcgtatgtaaagtctccaatagttttacggtgtcccaacacaatttcaaatccttgtgttttatcagaattgagattctcttgtggtaaagattgaccgaaagtggtcggtaatgttagtatacgagtagctagcaagccgtctctttttcggatgaagtaatcaaattccacgtttatcaaaccggataaaacagaagcttcaaatcctacgttggctgttgttgattcataccaagttaggtttgtattaggcattcctttatctttagctccgtttgtaagtcctccggatccaagaacataattaccagaaggataggtgtaaccagttaagtattgataggcggcaaaatcaccttcatctcccactttaccataagagcctctgattttgaagttatcgaacatcggtaaagattctttgaaaaaatcttcttcagagattctccatcctaaagatcctgcagggaaaaagccccaacgttttcctggtgcaaatttgtaggaaccgtcatatctgaaactgaattctgccaaatatttactggcaaaagcatagtttattcgtccgactaatcctgtatgtgcagaaacggaggctttaccatcattatttatatttgtcttgtctcctgcaccgatctgatcaatggctccaactgtaaattgacgataggctttgacccagtctgtccgatcattgtaaaattcccataaggctaataccccaacgtcatgctttccgaatgtatttttatagtttaaagaaatctgcccgttaggtttgaaataattgtcggattgtgttgtcaattcggatatagtgtgactgcctgatttgttataaacatcattaacggcgtcatatgtatactcataatattccttataccatttacgactgtatttattgttgtagtcataggataataatgctttagcagaaagaccttttacccaaggtacttcccagtttagagtgattgatccgttaaattcacggcgatctcttctgtcataaccgacattgtcgatatcggatagatgaacgggattacctttatctccaggatttgaccaataatcaggattgttgttggcataaatcgggaaaataggtttagccatttgaatactacgacttagcggttctgcttcataaggtttcattcgtgtatccaagcgtccgcttaattgtagatctaccgtgaaacctttgactatttcggcactgatattggagcgtacgttatattttttataattaaatgctttggacttgtaaattccttcttgatcggtgaaaccaagggagaagaagtatttcactttttctgcacctcccgatacgcttaaattgtggtaggtagtgggagctgtttttcgaatgacctcatcataccaatcagttgttccaatcccttgtttgaaacgttccaaatcttcagccgaatagggcgcggatactccgatattctgttgagcttcattatacaaagtcgcatactcgtatccattgtaatattctggataacgggtgatattttgtaaaccgacatatccgttatagttgatcttgggtttcccaatttccccctttttggttgtaacaaggatcacaccatttgcacctttaaaaccgtaaacggcggcggaagcatctttcaagatactgatcgattcgatatcgtttgcatcgatttgtttgaaatctcgttccacaccatctacgataactaatgcattaccaaaaccacgaatatcaatgcttgcatcgtcgtcacccggagcaccgcttctttgtacggcacgtaaacctggcaacttacctgctaacgcattactgacattcggagtcttgacagttgcaatatccttggcttgaagtgaagcaaccgatcctgttacggatgcacgtttctggacaccgtaaccgacaacgactacttcatccaatgcttgtgagtcttcgactaatttaatctggatatttgtcttgttgttgaccgcaatttcctgatccttgtagccgatatacgaaatgaccaacgttgcgttcggtgctacattcaatgtgaaattaccgtccatatcggtaatcgtaccgtttgttgttcctttttctaccacattggcacctgcgatagggcctaatgcatcttcaaccacacctttcactgtgtgttttgcttgttgtgggctgtctgttgttccggtcggtgagagaacgatgtaagaaccttcgattttgaaggatacattgttgtcgaacaggttctgcaatacttcctgtaaagaagtattttgggcatttactgagacttttcggttaacatttacgttcttgttataaatgaacagtaaattagtctggctttcaatgtcgttcaagatgttttccagccggacattgtttttgttaagagtgatgcgtatgctctgtgaacttaccgtttctgcttgtgcgcacatggcacaggaaaggaagaacagagatgtcatctttaaaacacgagatacacaaatttttcttttcttcatctttgtgatagtttaataaatgatattagattgaaacttcatttttacattggacatggtttgcccgtcattctgattatctccttttcataggcttatctatttaattgtttattgaatgcgaatttcagttccgctctctcgctcgaaggtgaagtgagcatcttgttgtaaagctctcaacacctgctcaatcccgtcggatatacggaacttcccactacatgcataattgtcgagcgtatgattgtcgataattattcggataccgaaatttttctcaagttccttcatcaaatccttgaaattgatatccttaaaagtgataagtccctctttccaactatatggattgaagtcggtgatgggagtgaccgtcagttttccgttgttgagactgactgtattattgggttctaacacaactgattcgtctggctgtgatttgtcggtaacttttacgctgccttgtatgagggctgtggaaaattcattttcgttataggcttccacattaaactgtgttcctaagacttccacttcgcagcggcctgtattgacaataaactttttgtttctatccttggctacatcgaaaaatgcttctccttttaaacggacttctcttgtatttccgttaaacgaagccggataagaaaattccgaccgggcattcagccagatatgagtcccgtctgaaagcgttacctcaacccgttgtccggcaggaactttaattgtgttgagcgctatttctggctggatatttttagtggtgaataccggaatgttatataataagaatagggcgataacagcagcggcagcacttccgatccatttccagagtggtacggactgcttgcggacatgattccctttttgaaaagcatttaattggagtgcatcgaacagggcacgttcatgatagaaagtttctctgttcattttatcggcatttacccattggcggatctgagtcagctcgttatctgtggcctctccgttaaacattttatgtagtaacttctgttccattttttcctgtttctattattaagggcgaacgggaggaaaaataccctaaagggaaaacgaactattttttattatttttcatctcttggcaagagggtttattttcactgtctggttaacgtgaaaatatttagggagtataaaagaagtccaccacaaatagcagacaaggaaggtagtcttttaactctttgcgtagtaaattcagagctttactgatatggaactcgatactcttcactgaaaggttggtttccttggctattgtttggtagtttttcccttcgtatcggctcatgataaaaatatgtctggacttttccggtagtttggccagtgcttggttgacaagttcttgtacttcattgctgaacaatgtctccggctcacatgcttccaggctggagatgcgcatttgtagttcccattctttgttggacagtaagttttcagcgatgttattccaggttcgttcacgttgaaggtaatccaggcatttgttttttagggtgactaatatatataagggtatgtctttgacttcttctaaccgatgccggttctcccagtaatacatcaggctttccgtcaccaggtcttctgctgtttcttgattatatgtgtaagaataggcgaaccgaatgtatcggtcccgatgggtgacgaaaatattattgaatcgttttatgtccgctttctcatccatgatgtgttgttcgaatggatttagttctaagggaactatggttgtttatctgacaaaaataagtaaaattctttttcacagtcggtaatttgaggggacaaatataaaaaacgtcatttttttctgcaaacaactattcaccgggtgaaaacaagtaccattaccgtcctaatctcccccacaaaatccatagttcccttagtactaaggtcacaatcctctcattatattatcaactctgtacattcttaattgtcgacaacgcggaaggcgggcagatatatcgtttgtcagggtcggaggccaaccgagctgtttggcgagttgtaaagctatgcattagcattcgtaaccaatagggttattgttgaaaaatagtcattgttgattatcagtcgtttatggtgaaagatgaaagataaaaacagcttttggtaaaagtttatgaaaaatgaattaaaaaacgccgcctttaaggtggcgttttttaattcgaaatcataagagcctgtttaaatttctctgaaataaattttgcatagccttcatcggccagctttgtctctttataggattattttgaaaaacaactgtcatactatcactaatttccttttatcaattgaatatcaatagacacaagcaatgatagtaggtatgacggatgcctattccatctatcatactatcactaaccgcctgtccaagattcttcttcacatgacttattttcaataacataataagataaacccattgacacccgggtctcgatatcattcacactcgggtgtcaagaccgttcacatccgggtgtaaaaagcctgtaaacgggaatcttcggcactttttctgactgtttgaagcaaaataggtcacgtgtttcaacaaaaaagacggcatctcctacagaaaaacatcctcaatacaactctcacaaccaacaaatgcaaaatttaaacaggctctaaaagttttgccaaaaggcctttttatctttcatctttcaccataatcgtttgataatcaatgaaggcttataataaagaaaataacaaacgctttttattcacgtggatatcccaccggattgttcatgatcggcaattggctgtccgttagtttcaagatccgttttaaagcagcctggtccatcgtggcacggggaacggttgccagaccggtggctgcgcagaaaatattgatgttttggcaaacgatgccggcatcgacagcggccatcagtttggtgtggtcggcaatgtttccgaagcgtgaaagatcggaaacgagtaccaagctgactggggctgatttgacaaaatcctgactgccggcaacagcggcccggtgatctcctttagcaataggttgcaggctgtttgccttggcatcgtacaggtaagcgccctctttcataatgacataaatgtcgatatcctgtttgttcaacgctgagggagccgttcgttttccgtccgggcggttaatcccgtttgctgcccataatagatccgatagatcctgtaaactgagttccttggctgcatattcccggtcggagtgacggtcggataacgctttcataatggaactgcctctgtttttgtccggagagcttaatttgattgctttcagatcttgtgcatacatggtgacgacgagtaataatgatgcaaaaatgaatgataattttctcataaacttattctttttatgattggtttcaacaaaaataggtgaaatatgcagaaatcgaacaccaaaatacaacttttacaattctttaaactgtaaaattacgaatggctcgtagataaagttacatttgcaactgtttttatgtgaatgtataatcgataatatctaaattctcaaatttaatgaaagaaaaactactctacttaatgctgatactatttgtgtctgcgtcagtgtttgcgcaaaccggaggtggatcagccgcctttacaattaagggccaagtagtcgactctctatccaatgagtccgtaccttatgccacgttgaggatagctttggcttccgcaccgcagaatcctgtgaaattgttggcttgtgatgatgatggcaagtttacggcaacgatgaacaagccgggtaagtatgtgatgacaatggaatctttagggaaagtgcctgccaagaaaacatttacattgtcggagagcaagaaagtcgtgaatttcggtaagttgtttatgcatgacgatacgcagcagttaaaagaggttaccgtaacagcccaaaagccgttggtgaaggtggaagtcgataaattgacttatagcctggaagacgacccggaagctaaaaccagcaatgcgttggaaatgttccgtaaggttccgatggtcacggtggatggcgaggataaaatccagttgaaaggatcttccaattataaaatctatatgaatggcaaaccctccaatttattgagtggcgacaacgcatccgatgtattgaaaagtatgccggccagctcgatcaagaacatcgaggtcattaccgatcctggttccaagtatgatgcagaaggggttggaggtattatcaatatcattacgaccaagaacgcattgcaaggatatacgggaacgattcgtgccaatgccagtacgctgggtagctttggtggcggtggttatgtttcgatgaaggcaggaaagttcggtattactgcgaattatggctataactaccgtaattccccctggaatgatacctattcgatgcgagatgaggaagaagcgaaataccagcagggtgacgagacttttacccgtccgtcttctttgttgaatgagcatggacgcagcaaaaacaaagggccgttccaatacggttatttggaaggtagctatgagatcgatacgttgaacttattaagtgtaggtgtcaatttgttccggggaaaatcaactaatctctccgaattgattgcggataaggtcaatcggaccgatctgacaaatggggaaccgacaacgatgtattcttataaacgttattcggattcaaaaggaacattcggctctacagacgtcaatgtcgatttccagcattcaaccagtaagaaggatgaattgctgactttgtcctaccgcttcagccaatcccccaatgacaatgaagggcattcccggcttgaagatctggaaggggtttatagccaggcttaccgctatcctaactggaatattaatgatgcttcaacgacggaacacacggcacaggtcgattatacgactcctttgtttaaagatcagacattggaagccggtgtgaaatatataaatcgccagagcaagagtaatacattggaacaggtgaaggattctttaaatgcctggcaggatatttcgcagcgtaatagtgacttccgtcatactcagcatatttattccgcttatttgggatatatggtcaagttcaataaattcggggctaaagcaggtgtccgtgcggaaggaaccagcttgaatgcggagtttgccaaggcgccggaagaaaacttcaaaacaaattactttgacgttgtcccgaatgcgacattgacttaccagttagacatgtcttcacagttacgtttaggatacaatatgcgtatccagcgtccggggatctggtatctgaatccgtatttgaataacatcgacccgcagcgtatctcgcaaggtaatccgaatctggattcggaaaagagtaataatgtgaacttcaactttagtaagtttgcacagaagttcagtataaatgcaagtttgagctatacatttgttaataatgcgattgaaagatatacaataattgccaacttcccggaatccgatccgctttctcaatataacggagcttcttatagcacttatggaaatatgggaaaacgtcagcaggtcggattgttcctgtatggcagttggaatccggttcctctgttccgtatctatatgaacggtgggttggattatacgaatatcgacagcaaaaagtcattgggactgacaaaggatggtgtggctggccgaatctttgcagggacacagtttaatttgccgaaagattttcgtattaatttgcatggtggttatttcagtccgtggattcaattgcagggaaaacaatctcctttctactttgcaggtctgaatatcagtaaggatttcctgaaaaagaaactctccgtttctttgggtgcacagaacccgttctggaaaaccatgaagatggaatcgactacgacaggtgaaggttttgtggaccgttctactacttggcgtcatgcccgtgagttccgtttgagcgtctcttaccgtttcggtacgatgaaaggccagatcaagaaagtgcgccgcggtatcagcaacgacgatactaaaggcggtggagaaggcaataacgccggtggcggtgaacaggcaatgtagaaatttatgaattctgatttatgatttatgggtttctaataaatcataaatcagaattcataaatcataaacctctccttaaatttccgctctcggacaaatctatccatccaattagacaaattgtgcctgtctttctgccgccaatcacctacttttggctcgtatataaagaattttgtaaacatgaaacacacgatctttagtctgatactcttttttatcagcacttcaacctttgctacgcgtaaagaaatcctgttgaacgagaactggatgtttcgtttttcccatcaggtacagtttaaaagtgaagaacgggtgaacctgccccatacttggaacagtggcgatgccctttccggcaagcaggattactatcgtggaatgggtaactataccaaaacgctgtttgtaaaacctgaatggaaaggcaaacgtctctttctgcgttttgaaggagtcaatacaatagcgaatgtttttattaatgatgtgcatatcggcgaacatcgcggcggatatggcgcgtttgtattcgagattaccgataaagtgaaatatgatgccgacaaccggatattggtgaaggtcaacaatgccttgcagcaggacgtcatgcctttagtcggcgattttaatttctatggaggtatttaccgggatgtgaatctgatcataacggacccggttaatatctcactcaccgactatgcttctcctggtgtctatctgattcagaataaagtgacgaaagagcaggccgatgtgaaggcaaaagtgctcgtctctaacggaagcgcgaaggtgcaacccgtaaaagtggacatcaagatctgggaggacgacaagcttgtccaacagcaggatataaaagtcacggtggatgccaatgactgggctacaaccggaatggatttgacaatccgaaatccccgtctttggaatggccgtaaagatccgttcatgtataaggccgaaatatctcttctttccgagggtcaaataatagatcggattgtacagccattaggcttgcgctattatcatgtggatgccgagaaaggtttctttctgaatggggaacatctgaaactgaaaggagtatgccgccaccaggatcgggcggaaaggggaaatgcgctttataaaatgcatcacgatgaagatgcggccattatggtcgagatgggggctaatgccgttcgtctggctcattatccgcaagcgacttacttttatgacctgatggataaatacggaattgtcacctgggctgaaattccgcagatcgggccgggcggataccaggaccagggctacatcaaccagccttctttccgggagaacgggaaagagcagttgaaagaattgattcgccagcattataatcatccgtcgatctgtttctgggggttgttcaatgagttgaagaccatcggagacaatccgaccgagtatatcgaggaattgaacgacctggcccatcaggaggacccgactcgcctgacaacatctgccagcttcctttcttacgacgatgatataaataaggtgactgatgtgatagcctggaaccagtatttcggttggtatggcggttctccttccgatatgaggaaatggctggatgccaatcataaggcacatccggagtataagattgccatcagcgaatatggggcaggggcgagcatctaccatcagcaggattccgtgaaacgggggattgcttccggttggtggcatccggagaattaccagacttattatcatatcggaaactggaaagcattggcggaacgtccgttcgtctggggttctttcatttggaacctgtttgatttcggtgcggctcatcgtgtggaaggcgatcgtcccggtatcaatgacaaagggctggtgactttcgaccgcaaggtgaaaaaagatgctttctatttctataaggcaaactggaataccgaggaaccgtttgtttacatcacgaaccgccgccaccgcgaccgttccttggctgttacggacatcatgatcttttctaatcaaccagaagtcgaattgtttgtaaacggaaaaagcctcggccggcagaagccggatgaatatgcgacattcaagtggaaaggggttgctctgcaggatggggagaatacgatagaggctcgttccacccaaaagaagaatccagtgaatgataaggtggtctggacggtgaaataataatagttagaatttttaagggaggtgccaaaattcctctctcttgtcgggaattaatcccccgacaagagagagatttctttttttgacattccccttttttattccttcccgtaagggatcagctctttcagtatttgttctttataccacggatcgtctgcttctttcagcaagggaaccatctgtttgcataagtcggatacgattcccttattctcctgccaagggagattctgcatctgatacggatcttccaggtcattaaacaaaaggatgtccttgagttcttttgtctttcggtcgattgtgagtgacatggtatattgatgtgttttgatccctctcgacaccggaaaataagaaatgacttttccatcggcatccttttccccatcgatatttttgatgtacaaggctccctgacgcaaagggacggaagaatcctttcctgtaaaacgtcccgcataattccgcccttccacagtggccggaatctgtttttccagaccgcacagtccgagtatggtcggcatgatatcaggagaagacaacaatagttcgctgtcgatccgaggtattactttttcaggaaaacgaactatgaacgggacgttcatgctttctgcataaggtgagtttttgggatcgtccgtattttggctgcacatggtttctccatgatcggaagagaaaataacgagggtgttcttgtccaatccctgtttttcgagttcgtccagtattcgtccgaaagcccggtcgacacctgtcaccgatgcaaagtaataacgtacggatggtgcttttttcatttcccggttcgcattcggacgaatcaacaggctgtccagcggtaggtctttgtataagttgtaatcttcctccatgcaatcttccagtgaggcgtacggactgtgaggcgggttgaagctgaccatcataaagaacggcttttcagggtcccgtacgttcccctcattccgcagataggagatggctttgtctgcttcatgttcgggcgaccactcgtttatctcatgcttgacgccttcggtatcccaatagtgcggatgcttgtggacgtcataggtcccgtacgaataccagtaatcgaaaccatgccggcgttctgccggcgtataggcatcccaggccggaacacggtcttccacgtattttccgggacgttccgggtcattgggagtcgggcagtcgacatgcagtttcccgatataagcacagttatatccggcttggctgaacacgtcgctaatgcaggtcgcatcttcgcgcaatgaactgatcgggcggttggcattacagttcagaggtactccgctatgttccggatacatccccgtcaacaatattccccgatgcggactgctcagcgggcagttgctcatggccgaagtcagcacaacagattctttcgcaaaccggtccagattaggcgtatgcaccggatctccctcgaaattcaccgcatcccggaatcccgcctctctccagaaacccatcgcatggttacgcatttggtccgggaaaacataaattacgtttggagtacttgataaattcagggaggtaacaggcttttctttgcatccctgaaaggagaaaagaagaatactccctaaaagatatgccgcttcttggttggaatgattgagttgtttatacatatgtttattgatttattgaacgtaatgatattttgcaattcatttttcctggtcttgataagatggagatgagattcaatgttcacattgttgccagtattgaaaggtgttcctctttctgatgggagcatatgaactacaaatataaagaaaaaggacagacatagcagtctgcccttttatttgtttattggtaggtgattaccatcctgggttctgatcttctttcagacttgggtttttctgaatttcattatttggaatcggccataaatagtcccgagactgaacgacacggttgtaatagaattgtccggtaaagccttttacttctccggccaaagtttccagtaatccccaacgtttcatatcactgaaacttaacccttcgccagccagttcgactgcacgctcatgtctgattcgttcgaatacttgttctttggtagttgcctgcagataacttggaccgctattaagtcccggcatgtcgacgcgtgcacggacttggttgatcaagtcgactgcttttgtctgttggtctgtctggttgtagcattcagccagcattaacaatacatcggcatagcggatcagcgggaagttgatcggtgtatcttcgcggttattgatagcaccattcatgtcatattcggctacaaatttacgccacaaatacatttcgtagtttccgttaacacgaataaaaccgttcttttcgtttgtctgtccggatttttctgtgataacatattctgtatccatcggagcgttggaataccaacctttataagtcgtgtacggcataatgatggaagccatcatacgcgggtcacgcttgttgtacatttctaataacttgtcttttgcggcgggataggtggccactttgtttaacccttcgtttaatgtcgcatagaatgtttctttcttgactgcatcattttcattgaatcccggaataacttcattccaatcgaaagcacgtccgtctttccattcgtaagaatcaacgaagtcagtagctgccattacattgttccagcaacttccataagaggcacggcttcccatatagaatgtcatcggcataccgaaatcagtaccgacaccaccgatattttgaattgcaaagatcatttctgaactttcatctccacctggtttgaataggttttcataatctgaatacaaagcatacttaccgctgttgataacattctcaaagcatgtggctgcttcttggtattgtttgttgtagagaaggacttttcctttcaatgccattgcagctccggatgtcgcacgtcctttatttgattcatcccaatctgccggtaaatgagcaatcgcttcatccaggtctttgatgataaatgtacggacttcttctgccgagcttcttggtttcaacatattggagaagtcttccgcaacgatagttgtctcatcataaatcggaactccaccccaaaaatcgagtaaggtgaaatagtagagggcacgcataaaacgggcttccgatttgtagcgggttttcagttcgtcggacatatcacattggtcgacgttctgtaatacaatattagcacgtgtgacgccttcatacagttgtttgaacttatcgccgacggctccttccgtagtggtataagtaccacggccgatgtttggatacgaaggtgcgccatatccggcacctacgccacctaaacagtcaaaaccgaattgacggccgaaaacatcgttgtgtgtcatttggctgtaaactcccatcattgcctgatcggcatgttcttgtgtctggaagaatgttccggcacttaactgatcttccggataacggtccaagtcgtagcagctactcattaacagaagtgatgctgcacaagtgaaaaataatttatacttattcataatgctttttcaattaaaaggttacattaatacctaaaaccgctgatttcattgccggataagccagcccgctgatttcaggatcaaatcctctgtaagatgtaaatgtgaagaagttttccaaactgccatagaaacgaagtctttccaattgcatcttcttcgtaatagatttaggcaatgaatagcctaattgaatgttacgaatcttcaagaaggctttgttctccaagtagaaatcactcatttgagtgttgatctgattctgggattgtaacaagcgcgggtagatagcgtctgtacggccttcaacccatcttccttctgcaacatctttgttcaactggtagccgaaacgtacggttgaagtgtttgccaatgcattttgccagtaaactttcacacctgcctgtccttggaacagaacggaaaagtcgaatcctttgtaggcggcattcaggttcaaaccgaattggaatttcgggttcgggccgtcgctgacgatttcgcggtcatccatgtcgataataccgtctccattgatgtctttgtacagtaaatctcctttttgaggcgtaccgaatgcggcaaacggattcacctttttacctgtcttctcgtcaatcggtgcgttgtcgatcatttgttgtacaagtgctagatcagcatctgtttggattatgcggtctgcacgcaataaatattgagaattgatggaatgaccttcccagataatattagccccgtcataagagataccgcctttatctgttcccttgaacttattgactttgttttttacgaatgtaaagttgccgttgacaccgtaggagaaatctccaatttggtcctgccagccgagagtcatctcgataccttggtttgtaacagtcgcactgttttgtttaggaatggatgctgttccgtgtacgtccggtgcaggcaagttgatcaaaatgtcttttgttttcttattgaagtaatcgacagtaccagttaatttattattgaccaaaccgaaatcgaaaccgacatttgtcatataggtagattcccaagtcagatccggattggccagtctggcttgtgcaagacctaatatcagtgcgttgttcaacgtgtagttgaatgcagaaccagagcttggtttattagcgtaagttgcgatcgcgtcgtagttcccaacggaattgttacccaaagaaccataagataaacggaactttaggttgctcaatcctttctccacccaatcttccataaaggcttcctgatccatacgccatgcaacggaagcagaagggaagtaacctgtacggttatttgaaaggaagcgggatgattggtctgcacgaagattgacttctagtaagtatttgttttcccaatccagattgatacgtccgaagaaagaacgcatagcccattcggtgcttgaaccggaagctgttgcatcaccgattgcagcatcgatcacgttcaaacttaaatcgatcatgtcatattttgtagcagagaagttcttgctgcgatacatttcctggctggctccgatcattgcgttcaaacctaagcggtcattcatgaaacgtttctcgtagcgtgctacaacatctccgaagaagcgttcggttttaccgtcgtaattcatgatgttggtttttcctctgttggagtaagtgatcacgttatcacggaagttccaaccgtcgatgaaaacaggtttccggcttcgttgttcatccacgaactcataagaatatgatgctgtaacagaaaagccttcgaacggtttcaacgttccgacgaaacgagaacgcatattggttttgcggatattaccagctttgctgttcaaacggatcaaagggttgttattcgccgattgtgcgtcgtcttcactattattcatagctccgtatcgtccgtccggtgcacggaataccataccgggagtcgttgctgatgcgtaggtgaacacatcatcaacagatgtgtctttcttgtcacttgccgtatatttggcagatggttccatgtttgaaacatatccgctgacttgtgcccctaaattcaaccacggttttacatcggctgaaatgtttacacgtccgttatatttttcgaagccggtattttccattacccccggattcttttgataaccgaatgatgaatagaagcggattttgtcactaccgccactcatggagatgacgtggttgtgagaagtcgaaggtgtaaatgtctcgtcaatccagttcgtattcggatattttaacggatctcgtccaccatctgcccgccattcgtctatgacagcttgtgagaactgagctttcaaattagaattgaggtagccttcgttgatcaattccatataagtggcataatcagaaacggggtccatagagctggggatacttggtgatgtgaatgaaacatacccgttatagtccaacttaatagaaccagctttcccttgtttggtggtaatcaagataacaccatttgcagcacgtgaaccataaattgccgatgatgcggcatcttttaatacggtcatcgattcgatatcctgtgggttaacagtgttgatacccgcttctacgccgtcgataatgaccaatggggaagattcattcagtgttccttgaccgcgaaccttgatcgacgcattgtcgttacccggctgattggccgtaccttgtacgtttacaccggctgcaagacctgccaatgcatgggatacgttggtaatagggcggctttctgtcaactctgcaacattaatagttgatacggacccggacaagtttacctttttctgtgtaccgtagcctacaactacaacttcgtctaacgcctgtgagtcttcggccaacttaatgttgaacgaagtctgattgtttacggggatttcctgatccttatatccgatataagaaacaacaagaatggaattaggagatacttccagagaaaaattaccgtccatgtcggtaattgtaccgttggtagttcctttttctacgacattagctccagcgatagggcccagggcatcttctaccacacctttgatactgtgttttgcctgttgaggagaagctacaacaggattcggctcatttgagccaaacgtatcggtagaaggattagcggaggccattccgattgatgccaggaacatagtagctcccaggaacatcgctctcgatacataaaagcgtttaaaatcttttgtcataataacaccagattgattaataaattgataataattctcatttctctaaataggcactttgtgttttttcaattgtgtttttcacaaaagtgtgttactgatctaagttcttcaaggactatggcgtttcgccatcatccgcgaattgccttcaccgcttatgtttgccttcatcagagaccaggtcggcctcggaagattctatattaagtgacaatgggtatgtttctgttgtcaaacagcctggtcatagaccttttgcctttagtcgaataccttttcgcccttagtcaaaaaggtaaggagtggtagtaatagctgttaatgcctgtgtatttgtttattaatcaatattgtagtctccttgtttttcacttaattatatagatgtgaaaccgagaggaacatgaccaacccaaatcaggacgagacagagtgaaggcaaatttttgaggtgaaggcagtccggatatctgccttcacccttgtatgacatgacaatcaaaaggtatcaaagacgggtgaagctgaatcggaaatccatgttgaactatcatgatgataaatcatcatttatgattcatatctgccaaactatgagaatttgccttagctgtatcgtttttacacttcaatgtatacctatgtgaatattacaaactgaattctaaataagtatattgccaattaagcttaatttatatgttatacaaaacatgcaaatcacaatgtattaatatataaatatttaacacattgctaaaaactcaccgttggaagattagtgcatatcaaatggataaaaatatacattcatacacattattaacatctaaatttgcaacgttttcatcatagttcttgaagaactacgataaaaatactcttttgtgaaaggtgcatatagaaaaatgcaaggttccggttttggaggatgagaattataatgtggcaggaaacaccttaaatttccgcttttggacaatccgtgcacatgaattggatgaatatgtctctttctcatagaggggacctctatttttgcgatattgaaaaataatacctatgagaacacaacgattcatcacaatcgtgtgcctgttgctttggacagtcgcacacttgcacgcgtatgaaaaacgcgacttgttgcaaaaagaggtcgattttgagaaagtcaaatccgcgttgataatggagcagaagtgggtgccgtatcctgattattctgaccgggccggttgggataaactcctcggtgattataaagaaaagtatatccggaaaggagaaagttatctggattatgagtggaaggttgtgaaagcgaccgattatctggagttcggacgaagtggtgaccgggcgattatggagagtccgttcggtaaaaacaattccgcactcggaagtctgttcatggcagagatggctgaagggaagggacgctttgtcgatcagattatcaatggtgtttttgcaagttgtgaaatgacgagctgggcattgtcggcccatttgggattacagaaggtcggaggatgctttccgagctatgaagaacatgtgattgatttgggttcaggaaatcttgcttcccagttgtcttggatttattattacctgaaaccttcgttcgataaggtaaatcctttgatttcaaaaaggctgcggcatgaattacaggtccgcatcctcgatacctatatgaatgaagatcatttctggtggatggcgttcaacctgaagcctggcggattggtgaataactggaatccgtggtgtaacttcaatgtgctgcaatgtttcttcctgcttgagaatgaacgggataaattggcaaaagcggtttaccggacgatgacttccgtggatcatttcatcaattatacgcatggagacggaggttgcgaggaaggcccttcttattggggacatgctgctggaaagatgtacgattatctgcagatgctttctgacgggacaggtggtaaagtctccgtattcgatcagcctatcattaagaatatgggtgaatatattgcccgctcttatgtggggaacggctgggtggtcaactttgccgatgcttctgccaaaggaggaggggatgccgatctcattttcaggtatgggaaagcagtcgaaagccctcttatgatgaactatgctgcttatctcaagagtctttctgataaggacggtattccttccggtgaccctttccgtctgttccaaaccttgctctcccgtgaagaactggaaggaatgagtgcagattatcaggctcccggctattcctggtatccggaaaccgaattttgctatatgaccaacaagaatggctttttcgtggcaacgaaaggaggctataataatgaaagccataatcataacgatgcagggaccttctccctttacttgaatacgacgcctatttttatcgatgccggagtcgggacctatacccgtcagaccttcagttccgaacgctattcaatctggacaatgcagagtaattatcacaacctgcctatggtgaacggtgtgccacagcagttcggttcggaatttagggctacggatgtgcactttgatccgagacgtatgtatttctctgcaaatattgcgacagcttatccggcagaggcaaatgtaaaaaaatgggtccgttcgtaccagttgggaaagaactccctgaaaatagaagattcgttctctttggacaaggcggataaaccgaatcaagtcaatttcctcacttgggggaaggtggatgtgtcggttccgggagtagtcacggttgaagtgaatggtgagaaagtccggatgacgtataataagagcgcctttacaccgactgtcgaaacgatccgcctggacgatcctcgcttgtcgaatgtttggggcgaacaggtctgccggatatcgttgaacgctaataagcagccgctttccggctcctatacttatacaataacaacaataaaataattggtacatgatgaaaaatttgattgcatttgctttttcggcatttctgctatcttgtgcaggtgcccctaaaacagaggaaaaaagttttattgacgagaatatcgattttgcccgtgcacaaatagggaatgagatcggtgtgatcgaagcgagtgggaaatgcttgaatccggtgacgcttaagacagacagttctgtctattattgtggttatgcggattggcggagcggctttttccccggatctgtctggtatttgtatgaactgacgggcgacagcacgttgctgccgttggccgccaaatatacggatgccatagaggaagccaaaaacctgacttggcatcatgatatcggatttattgtaaattgcagtttcgggaatggcttgagactggcagggacgccttcttataaagatgtgatggtgcaggctgccaagtcgttgtctacccgcttccgtccggctgccgggattatccagtcgtgggatgtggaacgcggatggcagtctgaacggggttgggaatgtccggttatcattgacaacatgatgaatctggaactgatgttcgaagcgacgcgtctgtccggcgactcttctttctataagattgcggtgtcgcatgccgatcgtaccatggaggaacattttcgcccggatggaagttgttaccatgtgattgattacagtatcaaggatggtaaagtgcgccatcgccagacggcacaaggatatgccgacgaatctatctggagtcgcgggcaggcatgggctatctacggttatgcggtatgctatcgtgaaaccaaggaccgtaaatatctggatcaggccttgaaaacgttcaatatgatgaagaatctggagaatatgccggaagatctgattccttactgggatatgtcggctccgaatatcccgaacgaaccacgcgatgtatcgacggcttcctgtatcgcttccgcgctttatgagatcagtacgatggatgttccggatgcagccggctataaaatgtatgccgacagtatcatggtttcactttcttctccggcctatcgggctgcattgggcacgaatggaaacttcctgctgatgcattctgttggcagcattcctcacaattcggaaatagacgtcccattgaactatgccgattactattatctggaagcattaaaacgtaaacgggatatcgagaaaggtctttaattaatgagtatgcattatgcttaaatatctatttcccttatcatttttcttttttatataatattcataactttgcttatccgcgcgtatcgggaccggcaaggagagtttccgtccgataaaccctattatttgctgatcgatatgttgttgggtggagcttgtattggcgaagtcgattctttggctttgccggtggagatgaaagtggggcaggtacgatattataggaaggattgatatatttaatttaagatagcatgaaaacaggaaagttgattttcgcattggtatttctgatgttgtttgccgatgcttcgatggctgccaagtggaaagccaaacatgtagttttgatcggtctggacggctggggcgcttatagtgtgaacaaggccgaaatgccgaatgtgaagaagttgatggaagaaggatcttatacgttgaaaaaacgctctgtacttccgtcttccagtgccgtaaactgggcttccatgtatatgggggcgggaccggaacttcatggttacacggaatggggatcgcaaactccggaactgccttcccgtgtagtgaataagcacggtattttcccgactgtgttcagcttgcttcgcgagtctgatccgaaagctgaaatcggctgtatctgtgaatgggcgggaatccgttacgttgtcgatacgttagctttgagttatgataaaaatattacggaaaagccgcagaatccggccactgccaaatgtgcggttgaatatatcaagcgtgcacgtccggcattggtcaatatcgttttcgacgaacccgatcatgtcggtcatgctgaaggtcatgacacacctgcctactatgaaaagctgaaagagctcgacggctatatcggccaaatcattcaggcggttaaggatgcaggtatgttggatgagactatctttatcgtcacagccgatcatggtggtatcaagaaagggcatggcggcaagaccatggaagaaatggagactgcctttattattgccggcaagggaatcaagaaaggatatgaattccaggaaagcatgatgcagttcgactgtgcttcgacaatcgcttatatcttcgggttgaaacagccgcaggtttggatcggacgtccgatgatccaggtgtttaaatgaccgttttctttctgtattcagccggggtaatttcaaactgggctttgaaacagcgggtgaaataacgcggagaaccgaagcccagccggtcggagatgtcggcgatctgtagatcggggttttccgtcaacatggttgcggcccgcttcagtttgcagttgaggacaaagtcatttggtgtcatacctgtcagtgccttgaatttggcatacaatgaacttcgactgagtcccaactcgcgggccatcatattcatgtcgaagtcgatattatcaagattcttttcaatgatcgagttgaccgtatccaagaacttttggtctatcgggttgcttgccagcgattgtgcatcgaaatctttctgctggctgaatttcttttgcaggataatacgattacggaccaggttattgcaacgcgccagtaatacctttgcattgaatggtttgtttatatagtcgtcggcgcctcgttgtaagccttcgatattttgctcggcggaagtgagtgccgtaagcagtacgaccgggatgtgacatacatcaaaatcatttttgatcttcaagcacatctctgttccggacatttccggcatcatgacatcgctaacgatgatgtccggtcgttctgcgcgtgccttttccaatccttctttaccgtttcgtgccagcaggacgcggtaggtcggtgagaacagggagttgagtatctggagtaattcttcgttgtcttcgaccagtaggatcgtatgaggggaatcgtctccttcgatcaatagctctttttgttccgtatcggaaaactcttccatgtgatcggaaaaggcgaccgtgtcgggaatcaggctttccgtttgcttttcttgctgcttttgtgccagttctttctcggtaaaaagcgtgcagcctttctggagatggacaatgaaaatactaccgtagcccggtgtactttccacttgtatcgttccgtggtgcaactcgattatgcttttggtcaatgaaagtccgatccccgtgctgggagtcttggtgatattcgagataccgttttcagcctgatagaatcggtcgaatattttgtctatatcttctttgctgataccgataccgttgtcgataactttaatggtaacttcattttctttgttttccaaaatcatttcaatggctgcattcggtttggtgtacttgaaagcattggatagcaggttatagaagactttttgcatttgcttcgggtcgaaataacacaaaacattctcttgcggagccgtgaaattgtatgtgatggaacggctggacgcatattcataaaaagacaggtaaatctctttcaggaacgggacgatgtcttgctcgtatactttcagcttcatatgtccctgttccagtttacggaaatccaataactcactgatcaagttccgcatatgataagtgtttttatatactttcagcagtttgttgtatacggaaggtgacaatgaactgctttgtaataagagttctatctgggagataatcagcgtcaacggtgtcctgaactcatgcgagatgttggagaagaactgtagttttgcctgattcaactcttcgatcgcttctttttccttccgttccatttccagtgaagtttgcaacatgtattgtgatttcttgaaacggtaaatgctgtacagtatactaatgatcaagatgaagtagaggaaataagctaagttggatgcataccagggggaatggatatgaatgtccatcttgatggtacgcggttgttcctgattcgggtcgtattgtatttcccggacgatgagcgtgtactttccggggttcaagttcgtatagaaaatattgttgtctttgctgggtatccatttcttgtcgaaaccttccaacatgtattcgtaagacgcctttttcagcgtattgacatagttgttcgatgtaaaagtgaaaatcagattattttgattataggccagctctatttctcgagtgaaaggtagggcggtggccagcaccttgttgtggtcgccgggagaaacttgttcgttgttaatgaacaggtcggaaaaatatagttggtagtctttggcggagttgaacaactgctgttcaaagaatgtcgccatgccattgctgctgccgacgaatatttctccgtttttgcagaccaggattccgcaaccgatgtttatgcctgtcagaggcagggccgtccccagttccacgaccttgaacaggttttgatccggatcgaaaaaggtaattcctttgtcgcctgttattactaattggtccagggtcgacaaggtgagttcatagcagtagtcactggcgatgaagctattttcggttgtatatccgataaaccgtttgttcttctcgtcatagtggaacaggccggaaccacgggttccgaggaagatccgtccctctttgtcttcgattatttgagatatgggaaatgttcccaatccgttttcaccagaacggtattgtaccttgtcttcttcattttcgaggttgatcttccagacacctttgccgtaggccagccaaatgtaccctttcgagtcaattaggaagcaggtgttcccgtaatacttaccgcttttgaacaatggagatactttttctgtatatagattcattttgaagattcctttcggtccggtacaaatcaattcgtcattgtagattctcatctggttgatgcggtcgcctgctattacggcataagacggatcttcgaaatagggatttttgaaccgtttgtttttgatgtcgtagatggatagtcccccggtatgtgttccaatatacagtttgttgcgttcagggctgtaggctattgccttcaggttgttatgagcaatggagttacgattctcatcggccatgaagtaggtgaatttcttcgttttccggtcgaaaaagttcaacccacctccttcggtacagatccagatattattgtctttatcttccaccatattaccgacgaaaggataattcaggcaatcgttccggctgttgttagctgcataaaccgtgaaaatatctgtctccgggttgaaataattgacaccgccgtaataggtccccaaccagatcgtgccttgtctgtctttgtaaacggggaatacggatgaatgggtcatgctgccgggcagagggttgcgggcataaacttcgaactgattgctggtcggattatatttgtttagcccggtgaaagtgccgaaccagatgttcccgaagttgtcttccacgaaatcccggacctggttgctcgatatgttgttggggttggaaggatcgtagcggtaacgggtgaaattgccgtgcacgtcccttttgtacatgccattcatgcgaatggatatccaaagattatatttggagtcttcatataggtcgtaaatgtcttctcccatgatcatacaggtcagggatttgtcgtcattcatcctgaagagtccgtctgtagtgccgatccagtaccggccgccggaatcttccaacaaacaggtcgcacgctggttccggttttccagcctcgtgacgaaatcgaaatcgtttttatccggattccaggtgagtatggagtcagctattcctacccatattgttcctttgatagaagcgacggtatatacgtttgatttccgtaggcatgagaatttctgtgtctggatgtcatagcggatcaaggattgatcggagtcgaagaaaacatttccatctttgtcgccggcaatgaagtgcgtctggttacctatcggattggcgttttggcgatgaaattcggatggtttgtatactttggtctgtacgccgtcgtatatgctgattccctcttccgtcccgaaccacattctacccaaattatcctggtagatggccatgacggaaagttgtgacaggccttcctgcatgcctatatgcttgaaatatatcgggtatgtgccggaacaaaatcctataagcagtatgagtgatatgatgattcttctcatagtattatagtatataacattagcagttctgttgtttaaggggctaaggtaaaaaatttttctaaaagcattatctttgcaggcatgaaaaagcaagtcttcattttttatccgtttttgttagttctcctgttgctgttgtttgccggcggactggtttatggcgctgtctcgatacccgttgaaagtgtggtgaatatattgctgggagagggaacggagcgacttgcatggcagaatattgtgttgcagagccgttttccccaggctgtaacggctttgttggcaggtgcttcgctggctgttagtggattgttgctacagacattgttcaggaatccgcttgccggtccttccatattgggaatcagtgacggggccaatctgggagtcgctgcgatcatgctctatttcggcggttcgttgagtatggtgaccgatttgccgatcagcggttatctggcggttatcatggccgcatttagtggtgcggcctgtattttgggattgattatttatttctcggcgaaggtgaagaataacgtcatgttgttgattatcggtattatgatcggttatctcgcttcatcattgatttcggttctgaattattatgcatcgactgataaggtgcatgcatttgtgatgtggggattggggaacttctccggggtttccttgcaacagctgccttattttgcaggttttacctgtataggattgctattggccattcttttgatcaaacctctgaatgcattgctcttaggagaaatgtatgctgccaatttaggaatcaagatcaggcggacgcgtattctgatcctgttgtgtacgggattgcttactgcgactacgactgccttttgcgggccgatctcctttatcgggctggcggtcccgcatgtcgcacgtttgatgttgggctcatccaatcataagatgctggttcctgtaacgttgctgaccggttcttgcatcgcgttgctttgtaatctgctgatggtactgccgggtacgcataacatattgccgctgaatgccgtgactccgatgctcggtgcgcctgtcatcatttatgtaattgtgaaccggaaaaacatccaatactttgactgaccgatatatgacaaaagtagctgcaatagaaacaaaaggactttgtatcggttacctgctgaaaggcggtaagcggaaagtggtccatgaggatttgaacctgcaactcgtttcgggcgaggtgacttgtttgttgggactgaacggtgccggtaaatcgacgctgcttcgtacgctttgtggttttcagcctccactcggaggggaaatacgtttgatggggaagcctctttccggttattcgcaggcaaacttttccttgactgtcggtgttgtactgacggaaaagactaatgcaggaggaattaccgtctatgaactggtttcgttgggtaggcatccttataccggctttttcggacagttgaagaagcgggatcatgttatcatcgagcaatcgcttgaagctgccggcatagctcataaagccaataactatgtctcggagctaagtgacggtgaacggcagaaggctatgattgccaaggcgcttgctcaacagtgcccgattatcctgttggacgaaccgaccgcctttctggatgtgaccagccgtatcgaaacaatggttttgttgcatcgcctggcagtcgagcaagagaaagcggttctgctttctactcacgacctggacctggctatccaaatgggggattgcctctggctacaggagaaaggacgtccgatggcttgcggaactcccgaagacctgattatgagtggagcttttgaatcttttttcggtaaggagggaatcgtattcgatccggcaaccggaaagctgaatacggaagctcctacgtcacccatcggtgtggaaggcgactttctgacttcttattgggtagggaatgctctgatccgtaatggttaccgtccttcgcccgtaaaggaagggcagttgaatatcacttgcaagagcccgcatgaactggttgtggctttccctgagggctgcaaggaagaactccggacggtggcggagcttgtctctcttatcagcatgagaaaaagtttttatggacatggaaacaacgtttctcgcttatgacaataaattttcccggtaggaaataaaagttttgtttaagattaaaaggaataaatatggcaaacgaaataacatggcggctggagcatgagaggatcggccggttgttgttgcattatgcgatgccggcagtgatcggtacaatggtgaatgctctttataatattgtcgaccgtatctttatcggtcagggagtcggtccgctggcaatggcaggattgacgctgacattccctattctgttgttcctccaggcgttcggaatgctcatcggggcgggggctgcgacgcgtgtctccatctatctgggacgaagggagaatgagatggcggaaaaggtattggggaatgctttcactttgacattcatcataacgcttgcgacagtagttccctgcatgatctggatgaaagatttattactggctttcgggggaagcgaacagatcatcccgtatgcgcaggactatctgaatatcgtggttccggggacgctcctgacctccctcagttttggcttcaacgctgtcatgcgtgcttccggctatccgaagaaggcaatgtttaccatgctgatcggggcgataaccaatgtgatactcgatcctattttcattttctggctggatatgggaattaagggagctgccatcgcgacgatcatctcgatgctgctctgcactctttttgtcatgaaccattttgtccagaaagacagtatcgtccgtttccataaagggacgttcaagctggaaaagcatgtggtatggaatatcctgacgatcggtgtttcgccttttgccatgcagttggcgggaagtttggtggtggtgatccagaactatgcactcaaacagcatgggggagacttggcattgggggcaaacggcattatcaccagtgtcggaatgcttttggtgatgctgattatcgggatcgcgcaggggatgcagccgattgtcggtttcaatttcggggcaaagaaatacgagcgtgtccaggaaacgctacgtctggtcatcataacctctaccattatcatgggagtcggctgcttttgtagcgtggcgtttccgaaattgatcacccgtgcctttacgaacgatcctgatttattggatgtgacggcaaatggcttgcggatcagtttgctggtatttgtggttgtcggttcgcagatctcgatcagccagtttttccaaagcatcgggattgcttggaaggctatgtttttgagtttaagccgccaagtcttgttcctgataccagcgatgttgctgttctcccgcttttgggggttggatggtgtctggtatgctgctcccttctctgattttgttgcggctgtaactgcttggctctttttgtggtatcatgttaaaaacatgaaaagtaagaattcggattgaactttttagtatcttgtttgtcatactatatgaaagtagattgattaggtttcaactaaaagaatgagaagtatgaaaagagtattattattactggctgtcctgctatttagtgcagggacaatgatggcccagcaggataaagctgccgagaaggccgctaagaaagcagaaaaagaagcgaagaaagctgccgaagcagctgaacagatggccttgttcgaacaaggtgtacaagcactgaaggagaaagattttgtattggaagccgaacgtgtcgagtttaagcgtggacaattcgtctatgtgaccccgagcacgaacttcgtttccatgaaaggtgaccgggcgactatccagttggctttcaatactgccgctgccggcccgaacgggatcggggggataacggtcgatggcagtgcttcaaatatagagatgaaaacagacaaaaaaggaaatgttacgtttagtatgatggtacaaggtgttgcagtctccgccaatgtgacaatccgtatggtaaaaggcacgaacaagtgtacggcaactgtgagtccgaacttcaacagcaaccgtatttcgtttaccggttatctgtatccgtcggatcagtccaacgtgtttaaggggcgtgccatctgacgtgtagattcttttgttcaggaaaagctgctttcggaaagggaagcagctttttttgtgcaacgtattttatatctttgtccgtcaaaatatcataaacataaaagtcatgcaattagcaatagatcagaaagacatagataagttcctgatggtgggtgacaaggtgcttatcaaaccgaagaacccgcagagtcagacaaaatccggattgtatctgccgcctactgtccagcaggagaagattcagagcggctatatcatcaaggtcggtcccggtttcccgcttccttcccagagtgaggaacatgaagtatgggaaaagaaaacagagggtgaggtgcattatcttcctttgcaggcgcatgaaggcgatttggctgtatttctacagaatgcggcttacgagatcaattttaatgaagagaagttcctgatcgtccctcattcggctattttgatgttggttcgtgacgaaggtttgttcgaataactcctttttgtttggcaaaatactgtgctatccagttttttgatgtatttttgcaaccaaatcaacaagactaactatcaatagtagcgattataatgaataaaattgtaagtaaagaacatttctctgccaacgtagtgaaactggaagtggaagcacctttgattgcccgctcccgtaaggcaggccactttgttatcgtgaaggtgggtgagaaaggtgaacgcattcccctcaccattgccggagctgatacgacgaaaggaactatcacactcgtgatccaggctgtaggaggttcgtcaaaaaagatatgcgaactgaatgccggtgattatattaccgatttggtcggcccgctggggcaagctacccatatcgagaaagtaggtacggtcgtgtgtgccggaggtggtgtcggtgtggctcctttattgccgatcgtggaggcttttcataaggcgggcaaccgtgtgattgtagtgctggccgcccgtacgaaggatctggttatcttggaagagcagatgcgcgccaactccgatgaggtgatcgtgatgacagacgacggttcttacggtacaaaaggtttggtgacgaatggcgtggaaagtgtgatcaaccgtgaaaaggtggatttgtgcgtcacgatcggtccggccgtcatgatgaaattcgtctctgccttgacgaagaaatacgagatcccgacagtcgcctctttgaatacgattatggtggacgggaccggaatgtgcggcgcttgccgtattacggtcggaggaaagacgaagttcgtctgtgtggacggaccggaattcgatgctcaccaagtagatttcgatgagatgctgatgcgcctcggtgcttataaagatattgaaaagaaataacgaaaccacagtaaacaaatgacaacagaagaattgatcgctgcccgtcgtgccgaaccgtggagagaagcactgcgtaaaagcaaaaaaaataaggaacgtacggatatcccccgtgtagaaatgaatgagctggatgcggaataccgcagccatacccgcctcgaagaggtaaacctcggattgacgaaggagcaggccatgcaggaagcccagcgttgtctggactgtccgaatccgacctgtatgcaaggatgtccggtaagtatcaatatcccgacgtttgtgaagaacatcgagcggggagagtttctggaagcagccagagtgctgaaggaaacaagtgcattgccggctgtctgcggccgtgtatgtccgcaggaaaaacagtgcgaaagcaagtgcattcatctgaagatgggtaaaccggctgtcgctatcggttacttggaacgttttgccgccgattatgaacgggaaagcggaaacatttccatcccggaagtagcggagaagaacggcattaagattgccgttgtcggttcaggtcccgccggcctttcgtttgccggtgatatggcaaagcgtggctatgacgtgacggtgttcgaagctttgcacgaaatcggtggtgtgttgaaatacggtattcccgaattccgcctgccgaataagattgtggatgtagaaattgaagggctgcgcaagatgggtgtgaagttcgtgacaaactgtattgtcggcaagacaatcagttatgacgatctgcatgcggatggtttcaaaggaatcttcgctgccagcggcgccgggcttcctaactttatgaatattccgggagagaacctggtcggggtgatgtcttccaacgaatacttgacacgtgtcaatctgatggatgcagccaatccggatagcgatacgcctgtcttgcagggtaagaaagtggctgtcatcggtggtggcaatacagcaatggactcggtccgtactgctcgccgcttgggtgccgaacgtgccatgatcgtttatcgccgtagtgaagaagagatgcccgcacgcttggaggaggtgaaacatgccaaagaggaaggtgtggagtttatgaccttgcataatccggtcgaatatcttggtgacgaacggggccgtgtcaaacagatgcgcttgcagaagatggaactgggcgaaccggatgcttccggacgtcgtcgtcctgtaccagtcgaaggagcgatcgaaacaattgatgtggatgaagtgattgtcagcgtcggtgtttctcccaatccgcttatcccgcgtgctttccagggattggaagtaagcaaaaagggaacgatcgtggtgaatgaagaaaatatgcgctcagccttgcctgatgtatatgcgggtggtgatatcgtccgtggcggtgcaaccgtaatcctggcaatgggtgacggtcgtaaggctgctgctgcaatggatgaagcattttctgacacatcaccatgtgtagacaagtaacctgccaactatcccgtttcctgtaatcaactaactcaaaacatgccaggaactaaatgatagcatatggtaaagtagatataggtagttactgcctgttgccaataggtggtactacctattggtaatatgtagtactatgtgtctataataggtggtactacatataagtaatatgtaatatgtcatgaattagttcactatgacttttgaagtagtttatggtaggttctggatcagttgttaatgagaacaggctgactccaggagaagtttccggatacaaaaaggtgtcgatgtggtgtcgacctaaaaacttacatcgacaccagctaatatattatttattagacaaatgacaacagaagatgtcaggtgtcgttctcttttgtattatttgtgtttatggaaaggaggaaaggaatattttgtgaaatattataaatcggataacattttgtcgatcgctgtttttacggatgatagattatttttcatgacatcaaaaactatgaccgcatctatgtcgaagtaatgatgtgctataatgtctcgcattcccataactcctttccagtcaatttcaggataatgcgataaaagttctttgtttgtagctttatcgatacgcttaacgctttctccaattgcaatcaaaagcatacaaatactttccaatctctcaactccacttgatgttgtcaggaaatcgtctggagagagtatcgtctctgatctctttaatattctttctaaagcagtttgtatctttgtcaaagaagaacggattaattcagtatcacacataaatcccctccttctcaatgcggtttctcaaaaaagaatccatgtgatcacgcaatcggacaatatcgacattacaaccgaatagagattgtaaatcttcttttatatgtaccaaagcgaacatattgggctgtgaagtttccaaataaacatcaacatcgctgtcttccgtttgctcacctctggcgacagaaccgaatatccccatgcgggtaatgctatatttggaagcattcttcgtcatatagtcacgcaagatcgttatgtattctgctgttgatctcatcttgtcttttttatttttcacaaagatacgcattcatgtggcaaaagcaaatggtaggaaaataaaaagccccgctattcctaagaataacgaggccttttggaagcgagcggaagacgggactcgaacccgcgaccctaaccttggcaaggttatgctctaccaactgagctacttccgcaaaatattgtttgctcaaacttgtgtactcgaagcgggacttgaacccgcacagccgcaatggccaaaggattttaagtccttcgtgtctaccgattccaccattcgagcatccctttctcttaagagatgagcggaagacgggactcgaacccgcgaccctaaccttggcaaggttatgctctaccaactgagctacttccgcattgttgcattgttttcgtttgcgagtgcaaaggtagatgaaatttttgtttctgcaaatatttggaataaaaaaatgcagggcaacgcatttttttagtttctcacaacccattcctgtctgtcggacgatactggagtcatgtaatattttcttaatggaaattgcgatacgccctttgtcggtgctccggtcccatagccgatatcatattcagttccgcattccgggcaaattgcttttcctgcattgtcggcttctatgatgatattctttttggcttcgtggggacagcacagatcaaatgcatagtaggtcgcatttccgtaattgtcgattccgcatacaaccaaaacaccggaaaagcccgtcttttctccggcagtacgggctttagtgatggatttgtgattgtatatgcctactagatctttgtcgccgaagcgcaggtctagttctaaatataccggtgcatagggtatatccgattcttcgaatttggaacacgaacaaactaatgatataagtaagcaaaataaaaaccgtttcatcgtttattaggataacagctgttgctcagcctcgtttactctattaaacgcgaaaccgtccatgatattttgcatcaaggcggaaatctggtcattgcataaatttccgatacttccttcgtgcgtatggtgaactttcttgacagggacgaatttaccagcttcgatgttcaatcctacctgcttgtaagcgtcacggaaaggcataccttccaaaacgaggcggtttacctcttccacactaaagaggagtgcatatttgtcatcgtctaagatctgctcgttcacctttacttcccgcatcatgtgcgtaaccatgcggaggcaatccttcaactcgtcgaaagaggggaggaatacttcctttatgatctgcaggtcgcggaaatagcctgatggaaggttgttgctgatcagtgtgatctgctggggcaatccttgcagcttgttgcatttggcacgcgtcagctcgaacacgtccggattctttttatgcggcatgatactggatcctgttgtgaactggtccggcaacttgatgaaaccgaagttctggctgttgaacatacaagcatcgaaagctagtttggaaagggttgccgcaatgccggccatggcaaaagctacggtacgttccattttgccacgtcccatctgggcgtaaacgacattataatcgagcgagtcgaagccgagcagatctgttgtcatctggcgtctcagcgggaaagaagagccatatccggccgcagagcccaacgggttgcggttgcaaactttataagcagcctgcatcatctgcaaatcatcggtcaggctttcggcataggcgccgaaccaaagtccgaatgatgacggcatggcaatctgtaaatgtgtatatccgggaagcagcacgtccttataacggttactctgcgagatcaacacctcgaacaggtcggataccaactctacgatttcctgaatctgtgcgcgggtgaacagcttcagatccagcagcacttggtcgttacgtgaacgtccgctgtgtatctttttccctgtgtcacccaggctgcgtgtcagcatcagttccacctgcgagtggacgtcttccacgccctcttcaattacaaaccggccacagtcggcaacggcatagatatttttcagttcggcaagcaagatcgtcagttcctctttggtaagcagcccgatgctttccagcatggtgatgtgagccatcgagccgagcacgtcgtacttggcgagatagagatccatctcacggtctttgcctaccgtaaaggtatccacttcctggtctacctgaacattcttttcccaaagtttctgagccatcaaaaaaacatttaataaggcagggatgccaacatggtcgatattttatcgatcgcatcctgcaatggttttgataccattggtttgataaacggattcagttcggcgcggacggttattttcatccgtgtgtcgttctcttctacctgttttagctgaatccaaaggaacaggggaacaggcgagttcgtggtcgtgaatttgatcgtcttgttcggttcacgttccacgatctggaaggttatcttgcctaccggtgcgacggaaaaactgcaagagtctttatcgaactcgaaatcttgaatcttatcttgaggtatgcggtcctgcacctttcctaagttggataggtcggacagcatattaaaaatacgatcctcgttaaaggggatcgttttcacttcgctaacaaattcagtcattttcacttactttgtttcgggattccagtttgccggatctttgcgccattcctgaaggactgcgatttcggattcgtcaatgtaatctgtacgcaatgcttcttccagcacggcatcatagttacttagagtcgtcaatgtaacttttgcctctttgaaagcctctactgcaacagggaaaccatacgtgaaaatggcaaccataccggcaacgtcacaaccgaaattacggacagcctgtacggctttcaaactactaccacctgtagaaaccaaatcttctacaatcactacttttgaacccggtttcagttcgccttcaatcaggttttccaatccatgatctttaggagttgaacggatgtacacgaacggcagacccagtaggtcggcaactaatgcaccctgggcgattgctccggttgcaacaccagcaatagcatcggcattttcatacttttcgctgattgtgcgagccagctccagtttaatgaaacttctgatttccggataggaaagtgtctttctgttgtcgttgtagattggtgatttccaaccggatgcccatgtgaaaggattggccggctgcaatttgaccgccttaatctttaataatctctctgctactaatctttccagtgttttcatacaacctaataaaaatgtttatatcagtctgcaaaggtagacaaagggaatgagataaccttgtagttcttcaaaaaaataagctatacatattgtatagcaggtttaaggagagtttatgccacagctatgcctaaaatactgatccggatgccggatatggctttcatggcttctgcacaggcattcatggtggaaccggtcgtaataacatcgtccaccagtagaatgtgtttgtttttcaacgtgtcggtgttctctacacggaagatgtcctctacattttccgatcgttcgaatatctgcttgcgggtttgactttcggtcttttttatgcgggacaaggatgaggtgtcgaccgcgattccagtggcggaacggatgccgtatgcgatccattccgactggttataacctctttgcctcattcttttcgggtggagcgggaccggcaaaaggagatcgacggtgtcgaacagccctgtctcccggtaggtggtagcagccatgcgtcccagttcgtatccgagttttttgtttccatgatattttaaggaatggattagcttttgcccgcttccccctttcgtgaagtggagcagagcggtggcggcgacgaaagatgtttttccctgtaaaagcagacagaccggattcgtctccatatccgtaaaatgcgtgtagggcaaatgattcgaacaatgcaggcaaatatgctcttccccttccactaaagacctctggcaaagcaggcagaggcgaggatagaaaaggttgaggaggtcattcaaaatcatcctcgtagtcattcccgttgaacagttgtttcaggcagcggcttgtttcccttgtttcgaaaccgcgtccggcggcgaagcggagcagtttggcgtaaacctcccgatcgtccttaccacgggttactttctttttgcttttcaggagagaaaggaggatggagcgatattcttgttcgtcgataccttccagtgcttccgagcggatactggatggaatgcctttccgctgcatctcgtagttgatcttgacacgtccccatttgttgaagcgtaatttgtcgtttacgaaatagcgtgcaaaacggctttcgtcgatgaaacgttcttgtagcaggcgggagacgatccggtcgctttcttccccggccaatcccgccgctttgattttcttttcgacatcctggatgcagcgttcgctggcagaacagtaggcggctgcccggtgaagcatttcagattcactgatttgtttcatttgcgtgcttttataatccggtccttgccagacaagtcttggatcaattcgatattcttgtagccttcttcctccagcatctcaacaaccatattgccgcatgccgcattgatttcgaagtagagatggccgtttcttctcagttttttctttccgaaatgggcaatatgccaataatagagcagcgggtcgttgtccgggacgaaaagagccaggtgtggttcgtagtccagcacgttccgctccatgtcttttttttcttcctccttgatgtagggcggattgctgacgatgacgtccagaatgaacggaatgtccatttccgctttctccgggtctaggatatctgtctggatgaaagtgaccgttgtgttgttgcgtttggcattccggcgggcggtcgcgagcgcttccgccgaaatgtccgtcgcaatcacgcttgcttttttcagatgcttccggagtgtgacggctatgcagccgcttcccgttccgatatccaatatcttgatcttttggtctgcattgtcgaggatgacctgctcgaccagttcttctgtttccggacgcggtatcaggacggacgggtctacttcgaactgaaggctgtagaaatcggccgttcctaatatgtattggataggctccatctgcttcaaacgttcgactatgtcatgaattcggcttttttcgctttctggcagttctttgtctttacaaaataaaaaatgatgcggctgaatattacaaacccgctccataattaaacgaactaggctgctgacctcggaggatgggtatagatccctcaatgattccttaatgtatgcgatggtttcagtcatattttgtttttgggcaaaagtaagcataagataaattgcaaccaaacaaagaaagaattttccgatatcgaaacaaaggtttccaaacagtgaaacaaaaatttttctacggtgaaaatatattttcccgctggtttttcataatctttgtacctttgtcccgagaacatcgcaaggtatgttttgggttgcccgaaacgattcgagtaactctaaacgccttgtccttgcagggagcaggattatcctccaaagtcggataattccaaaatcaacgataccttgtggtgaatatagggttacacataataaactctctcttttctcttatactgtttattcaaatgcgcaaggaaaaaccgataaaaattgctacctttgcactcattatcggactgctaatgacctgagaaagcaattaaaacaacatatgaaactccttcgttgtcttataggctttggtcagcctcgcagggatagcgaaggagttttcgctttaatataaaccatggctgtacaaagtgaagccgcacttgaaaatgctctgattcatgcccttgaacaaatgagctatgaatacgtgaagattgaagaagaaagcaatctccgcgataatttcaaatgccagctcgaaaaacataaccgcaaacaacttgcggaaatagggcgtgaacatttcaccgaatcggagtttgaaaagattttgcttcatttggagggcggctcacgctttgaaaaatccaagaaactacgcgacctctatccactcgaaaccgaaaatggggaacgtgtgtgggtggaatttctcaataagaaacaatggtgtcagaatgagtttcaggtatcaaaccaaatcaccattgagggcaggaagaaatgccgctatgatgtgacgatattggtaaatggtttgccgttggtgcaaatcgaattaaaaaagcgaggggtggaactgcgccaagcctacgaccaagtgcaacgctaccataagacatcgtttcatggcttgttcgactatatacaggttttcgttatctccaacggtgtaaacacccgctatttcgccaacaaccccaatcaaggctacaagtttactttcaattggacggacaaggataacaaccccttcaacgacctcagtctgtttgcagcaatgttctttgataaatgtacccttggtaagatgattagcaaatacatcgtgcttcatgagggtgacaaatgtctgatggtgttgcgcccctatcagttctatgccgtggaggagattttggataaggtgcagaactctaccgacaacggcttcatttggcacactacgggagctggcaagactcttacttcttttaaggtggcacaactcgtttcggagttggatggcgtggataaggtgatgtttgtggtggaccgtcacgaccttgacacgcagacgcaatcggaatatgaagcgttcgaacccggtgcagtggatagtacggacaacaccgatgaactgacgaagaaactttcaagcgattcgaaaatcattatcactaccattcagaaactcaatgcagccgttacgaagcaatggtacagcaagcgtttggatgaagtgaggaagtcgcgcatcatcatgattttcgatgagtgtcatcgtagccatttcggtgagagccacaaaaatattgtcaacttctttaccaatacgcaaatattcggcttcacggggacacctatattcaaggagaactctaagaacgatcgtactaccgaagaaatcttcgacaagtgtctgcacaagtatctgattaaagatgccattgctgatgagaatgtacttggctttttggtggaatactaccacggcaacgaggaggtatcaccgggacaggaaagccgtatgcacgagattgccaaattcattctcaacaatttcagcaaatccacctttgacggtgagtttgacgcgctatttgccgtgcagaatgtgccgatgctcattcgttactataagattttcaaggcactgaatcctaaaatctcaatcggtgcaatcttcacctattcatcgaaccctaacgaggacgatgaactgacgggcatgaacagcggttttgtcagcgaatccgtgccggaggctgacgatatgcaggaaatcatcaacgactacaaccaaatgttcggtacgaatttctccatcgagaatttccgtgcttactacgatgatgtcaatctgcggttgaaaaagaagaaaaccgacatgaaaccgctcgacctttgtttggtcgtgggtatgttcctcacaggcttcgattccaagaagctgaacacgctgtatgtggataagaatttggaataccacggattgttgcaagcgttctcacgtaccaaccgtgtactcaacgagcgcaaacgttttggtaagattgtctgtttccgcgacctcaagagcaatgtggacgaatccataaaactgttcagcaacgggggtacgggcactatcatccgcgaggctttcgaggtggtgaaaaaggaatatgccgacatcgccaaagatttccttgccaaatatcccgacactgcggctgtcgatgcgttgaagaccgaacccgaaaagcgcgacttcattctcgctttccgtgagttgataaagaaacatgcggagatacaaatctacgaggactattcggaggatgaccccgaattgggcatatccgaacaactgtacaacgacttccgaagtaagtacctcgacattcacgacacgttccttgacagcactaccgtaggcggcacttccgttgaggataattccaccgaagacgaaataggacttgaagacatcgacttctgtcttgaactgttgcacagcgacattatcaatgtggcttatatcctcgagctgattgcagaactcaatccgttcagtgaaaactatgaggaacaacgccgccatatcatcgacacaatgattaaagatgccgagctgcgcagcaagtctcaactgattgacggctttatccgccagaatgtagatgaagacaaggagggcttcgtggagcgcaagaagaaagcggatggttctgttgacctcgaagaacggctcaaccaatatatccgtcaggaaaaaggcaaagccattgaccgccttgcggaagatgagcagttgcctaccgaactgctgaaccgtttcctctcggagtatgacttctcacaaaaagtgcaacccgaaattattcaaacggcagtcaaggagaagcacctcgggttgctaaagacgcgcagaaccgtgaaccgtattctcgaccgtctgcgcaatattatcagaacattttcttgggactaaaagatggcgtatgaaaacaaatgaccccggctatgtttatatactgaccaatcccagttttcgagaggattgggtgaaaataggtaaaagtactcgtcccgttgacattcgttcaaaggagttggacaataccgctgtgccgttgccttttgaaatctttgccacgatgaagacttctaaattcaatgaggttgaaagacttgtgcataagacaatagaccgattgacagacttgcgtattcggcaaaatagggaattctttaatgttgaccccaaagtggctcttgatattttcagagacatcgctttgacaattgacgatgcggtcataactgaatatgaggacaataaacctattatagcgcaccccgaaaagaaagaaaagaaatcagaattttctcgaccgaaaaaacgggagcgattcaaattcagcatggtacatatcaagataggtgaatatattacttttatccctaccaatctgaaagtgaaagttgcaagtgatgattccatcgaatatgacggacgaatttacaaattgtctccttttgtcggtacgtttcttccggaagaaaagagaacaccttcaaatgcctatcaggggagcaagtatttctcgtacaacggaaaaatattagatgacttaaggacagcctttgaaaaagaagctgataatgaaataaacattgtagaaaacaaaactgtttaagaacatgagtgaagaactccaacaaaaactccgcgcccagctttgggaggttgccaacaacctgcgcggcaatatgtcagccaacgaatttatgtacttctcgttgggctttatcttttataagtacctttctgaaaaaatagagaactatgccgaccgtgcgcttgaagatgacgaaatcactttcaaacagttgtggcagtcaggcgaagaagatgcccttgaacttcaagaggaagtcaagaagcagtgtttggaaaatatcggttattttgtagagccgcaatatctcttcacctctatcattgacgcaattaagcgcaaggagaatattattccctctctcgaacgttcgctgaagcgcattgaggacagtacgctcggacaagagagtgaggacgattttggaggtttgttttcagacatagaccttgcttcgcccaagctcggcaaaactaccgatgacaagaatacgctcatatccaatgtactgattgctttgaacggcattgacttcggagcggacgaagctacgcagatagatattctcggcgatgcttatgaatatatgatttctcagtttgccgctggagcgggcaagaaagccggagaattttatacaccgcaagaagtgagccagattcttgccgagatagtgactatcggacatactcgcttacgcaatgtatatgaccctacttgcggttcgggttcactgcttattcgtgcagctcatacgggacgggcatacgagatattcgggcaggagaaaaaccccactacttacaacttgtgccgtatgaatatgttgctgcatggtatcaagttcagtaatttccagatagagaatggcgacaccttagaggcggacgctttcggtgacacccagttcgatgccgtggttgccaatcctcctttctccgcagagtggagtgccgccgacaagttcaacaatgatgaccgtttcagccgtgccggtcgccttgctccgcgcaagacagctgactatgcctttatactgcacatgctctatcatcttgtggatggtggtacaatggcttgcgttgtaccgcacggcgtattgttccgtggtaatgccgagggcgttatccgccgtttccttatcgagaagaagaactgcattgacgcaattatcggcttgccagccaatatcttctacggcacttccattcccacttgtattctcgtgatgaagaaatgccgcaaggaggacgataatattttgtttattgccgcaagcaaggagtttgaaaaggtcaagacccaaaacaaactacgcaaggagcatatcgacaagattgtagatacttaccgcaatcgcaccgagatagaaaagtacagccacctcgccaccttgcaggaagtagccgataacgactataatttgaacattccccgttatgtggatacctttgaagaggaagagcctatcgatattaaggctgtcatggctgaaatcaaggaattggaagccaaacgtgctgaccttgacaaagagattgaaggctacctccgtgaactgggaattgtagaataaaacgaagagggtaagattatggctaaaaagttcgagataagaaacagcacagcggagttcttgatatttactgtcgcagacaaagagcaaggggttgaagtgttgtataaagatgaaagcatttgggcgacacaaaaagctattgccactctttttgatgtggatagaacggttgttaccaagcacttgaagaatattttcgacacttgtgaattggataaggaagtggtatgtgcaaaaattgcacataccaccgagcatggggctatagacggaaaaacgcagactaaagaagtacaatactataatcttgatgctatcatctctgtgggctaccgtgtcaattccattcgtgccacccaattccgccaatggtgtacttatgtgttgcgccaatttgccatccgtggttatgtcatagacaagaaacgcatggaaaacggttcttttatcggtgaggattattttgaacacttgttggctgaagtccgtgagatacgattgagtgaacgccgtttctaccaaaaactcaccgatatttacgccactgccattgactacaatcgcgatgcgcccactacacggctgttcttcaaaaaggttcagaacaaaatgcactatgccgtacatgggcatacggctgccgaacttatcgtgcaacgtgcaaactccgagaaagaacatatggggcttacctcttgggaaaatgctcctgacggaaagatagtgaagcccgatgtggttatagcaaaaaactatctgaaagaaaacgagttggaaaatatggcgcaattagtcaatgctgttcttgatttagcagaacgaatggcgaaacgtcacattccgatgactatggaagattgggcaaaacgtattgacatcatcctcgaagctggaggtgatgcgatattagccgatgcaggaaagattacggcagagttcgccaaggaatttgccgaatcggaattcgagaaataccgtatcgttcaagaccgtttgtttagctccgatttcgaccgtttcaataatggcgacaacttgttgccctttgatattaaccccgataaagagtaaggataagacttaaacgcatattgaaactgctacatatcgtagcagtttttcttgcagcataacgaaatttgattagagattaaaaataactatggcaaataataacgacaataaagtccttaatgttccacctaagagagtgcagaacgatgcttgcatcagctctgccgaacagaaggaacaaggcacgaaggcgcagccaaagggaaatgttccggctttacgatttcctggtttcactgataattgggaacgagtacgacttgggaatatgtgcgaggttcagatgtgtaagcgaataatggcatcacaaacaaatccaagcgtaggcgtaccattttataaaataggtactattggcggtgttccagatgcgtatatctcttatgaactgtttgaggaatacaaaaataagtataactatccccataaaggtgaagttctgattacttgcgcaggtacggttgggaaatgtctcttatatgacggagaagattcgtattaccaagactctaatatagtttggcttcgcaacaattctacaaagttggataacggctttttattcaatatcctttcaaacataaactggtctcgtttgaattccactactatagtgcgaatctataatgatgacttacgtaacctccaatttcacctgccatcgttagaagagcaaaagaagatagtaaaatctttgaatgctattgatgagcgcattgccacccaaaacaaaatcattgaaaagttgcagtccttaatcaaaggacttgtagatagcctattggaaaacccatcatgggagaaggtgtatttacgctcttttatgcaattctactcaaccaactccctgtcatgggaacagctaagctatagcaatggtaatgttcggaatctgcattacggtttaatacatggttttcagacgagtatgattgattcaaccctcttaccaaggatactgccgaattatcagcctaagcaatataccgtgtgccaggatggcgatgttgctttcgctgatgcatcagaggacactaatgaaattggcaaagctattgagttttccaacacgattgacgtcaaaacggtttgtggcttgcacacaattcatgggcgtgacataaagcaaaacactattcttggcttcaaaggattcgcctttaactctcgttattttcacgaccaagtaagacgactagcacaaggaacgaaagtatattctattacagcaaagaatctttcgtcttgttatgtatatattcctgacatgattaaacaggaaaacgtagtcagactgctcaatgcctatgaagagaacctgtcattaaatagaacgctattaaataaatacgagattcagaaacaatatctgcttcaacagatgctcatataaacatctgctggagtagatattgcttcaataataggtattgctctgtcaacaacttttcatttgccaaatggttatacaaagcatcaagagccgtagcgatacgtttttgttcttctaaggacggcaatacaaacttcatcctcataaaatcctgcttttgaagattaaatcgtgtgctaccttgtgccaacggatatattgctttacggaatgaagtactcgatatgaagtgagctatgtattgaggtaatacacggtttccatggaaatgaacgccaaagcagaagctattcaaataaagcttttgtgatttgcccaaatatacagcacccattccaacctcttctggggtttcggatgagagtgtgaataaggcatcaccgtactgcacgctgttttgcttttcgtctggggctatttgcaccagttcgtaatcattttccgaaatgtaagtgttctgatatacattcatgtaagttatgaatgggtcaccgcatccaaaatcatcaccacttttaccacttaaaccaccataggcttcacctaaatcagcgaaacaaacttggtcaccttcaatgtttttgagaatgtggtcatttagtcctttgattaaggactgcaacttttcaatgattttgttttgagtagcgatgcgctcgtcaatggcacgcaataacttagcgatttttatttgctcgtcttttgagggtattgtaatcttgatagatttaatctgctcaaaatttagcccttgtctatttcctcctgcttgaaaactatctatttgtctctgaccataattagacaataaaaaactacagataaatgaaggaacaagattttctttagtacgaataatacaaacatgttgatttacattgccaccaactatttgtttgtctactaatgcgctacgcccaatagatgctcctgtaatattaagcaatacgtcattgaattgtagttctgtgttcttttggcgtagatgcgtttcttcatcaatgaaagcaatatcatccagcagaagatttcctaaaccaacgttttggctacgtacaaaaggatgtccttctgtcttatatacagcttccccacctcttggcgtaacaccactacccacttttgtaattagttcgcctatagtacacattttccactctccactgaactccgggaaacgcaaaggtggaacttaaagtactcatttggctatgagtatataattagagagcgttgttgctccgaattatataccatatcattatgaatctgaaaacaattaaagagattgcggtcgcatggctcgaatacaagcgaccatttgtgaaagattccacctttgccgcttatgcactcaccgtgcagaaccatattgttccggcatttggagaatcgtgtgaattacccgaaactgatgtgcagcagttcgtgttgcagaagttggcaaacggtatcagtgtcaagaccataaaggatattctcatagtccttaaaatggtgatgaagtacggggtgaagcagtcgtggcttctccatgccgaatgggatataaagtaccccacatcatcggctacgaaaccgttggaagtgctgtctattaccgatcacaagaaaatcttggcgcatatccgtgccaacttcaacttccaaagtttaggcatctacctttgcttaactacgggcttgcgcatcggtgaaatctgcgctttgcggtggagcgacatttgccttgagaaaggttctttgaccgttcaacgcaccattgagcgaatctatgttattactcccgatgagaagcacaccgaaatagttatcaacacaccgaagacggcaaactcgtgccgtgaaattccccttagtcgagaagccttgtcactgataaagccgttgctgaaagtcgtaaatcctgctttctatgtggtaacaaacgatacgaagcccaccgaaccgcgcacatatcgttcgttctacaagcgtttcatggcttcactcaatatgcccgacttgaaatttcacggactgcgccactctttcgccacccgttgcatagaatcgggctgtgattacaagaccgtcagcgtattactcggtcatgccaacatatccacaacgcttgacctatatgttcaccctaatatggagcaaaagaaacgatgcatcgagcgaatggtaaaatcagtgaaatgagagaacggcttaattctcatatcaatcacggaaagtaaaaataagaaatccgccatcagtcgttattcgtaaagataaattctgatgacggctttcttttcttgattcaaacatccgtttcacggcacggttcacactttttcaatatttcccaaccgcttttccttggtgattttcgcataaatttgagtcgtggaaatgttcttatgaccaaggatagagctaacggtttcaatcggtacttcgttggattgcaatatagtagtcgctggtcttttgtcggttgatttttatccattggtggtcatcgaagtaagtcacgatattttcctctttcagattgcgcatatctgaaaagctcaatcccgtgaagatgcagaacaggaacatatcccagtagagttcctgcttggcgttcttcagctttccgtccatcagcattttttcgtatgactttttggacttcatcccggcttccaccatctcagccacttattgcttaatattgtgccataaagagcctgatttccgttggtcacgaataggtaacgcgattcaggtttcaattggcgttttcatggtttttcgtggcgtttacacgccaatcaaaaatcctttaattgtctgtatctcaaatcatcttcctcgttcttctgtattccaagaaaaagtagtacttttgttgaataaagaacaaaagaagatggttgtcgaagagaaatatatggcccgctgcatcgagcttgcacggggcggagaaggcaatacggctccgaatccgatggtcggtgcggtgattgtgcataaagggaagatcataggggaagggtttcatcgcaaatgtggcgaagcgcatgccgaagtgaatgcggtggcttccgtctgggatgaagcgcttttgcgggattctactatctatgtaagtctcgaaccctgttcccactacggaaagacacctccttgtgcggagttgattataaggaaaggtatcccgcgcgtcgtggtcggcactttggacccgtttccagaagtgtcgggacgaggagtacgcatgttgcgcgaggcgggtatcgaagtcgtgacgggtgtgctggaagaagaggcccgtgccttgaatcctgcttttatgactttccagatacggaaacgtccttatgtctatctgaaatgggcccagagcgcagatgggtttatggatatccggagggaagatgcttctgtgccttcggtgcttttgtcttctgccgagactctccgaagggttcatcggcttcgttccgaagtggcggctattatggtcgggacacgtacggcgttgttagacaatccgtcgctgactgtgcggcattgggctggccgttctccggtccgggtggtgctcgaccggacgttgaagttgccggtcggttcgcatctgctggatggcgcggtgcctacgctcgtatttacagctgtcgaagtcgaaagccgaccgaatgtcgagtatgtgcagattgatttcgggcaggaggtcctgtcgcaagtcttgcaatatttgtatgggcagaatttgaattcgttgatggtcgaaggaggtgcggaactgctggaaagcttccttgatgccggcctgtgggacgaggcctgggttgagacggctccggtcgttttgggtgcgggtgtgaaagcacctgctgttcctggcgtgttgaccggtacggaacagaggcacggacatcttttggaaacctggaaacaaaaggcttaaaatgaacttataattcgtaacgacactaaaatattataaatattctcctatatggggtataaagcaaaaaatgtttctacttttgtgcctttatatgcaacaaacttattttttgatgaaaaatagaatagtactgtttatagccggatgttgtgctctgttattgtcgtcttgtttgggttcggatgatacgcaatatgagtggagtaaagattgtcagattctatctttttctttgtcgaatgattctatcccaggtttgaaagatgtcgttttcacgattgatcaggtggatgggaaaatatttaatattgattcaatgccttatggaacaaagctggatgaaaaagtgatttgtacggttaagctggcttctacggtgtatacttgtcaggtcatgcaggaagctatcagtgatacgttaagctattggaacctggaagactcgttggatttctccaaaccagttaagttcgtgaacacattgtgggacggcaaaaccacaaaaacatacattgcgcaagtcaatattcaccaggttgttcccgactcgatggtctggggtgtttacaaggaaggtattacggacggtgctgtcaaggaagaaaaggtagttgttttcggtgaaggaagtggcgagtcttattatatgtatacgcagcctgtaaacgtaaacgaaggctaccggttgtaccgttcggccgttacggatggaaagaactggacggaactgtctgtatcggggcttcctgccggagaagtccgtttgtcacagattactgcttatgaagatgcgttttatgctgttacgacgaaaggtttcctttatagttcagccgatggccagacttggtcgctagtcgaaaatgcaccggtgataaaagctattttgggtgctattgatgtggacgatgattttacggcagccggaaagcagccgtcagcccttagtgcggttatcgacaagaatggcacgttggtttacgggtatatgaatgaagcgaaggaatggaacgaaggaactcttctgaacgaaggcttccctttgaccggtttcggtaatctttcttataattcgatgttccgtgcccgcctgttagtggttgccggaagagataaggacaataaactgacgaatacggcttgggcgacggatgatggcaaagtctgggcgaagttgacggatgacgaaacggcgccttttgataaacaggagggggtcgctgtagcggaatatgacgataagatatttatgttgagtggtatcaatgaagcaggtaaggcctcttctgacatttacctgtcacgtgacggcggcgtaaactggagtctgtcggatacattggttgtaatgccgcaggaattcaaggcaagagggttctcttctatctacgtggataaggataattatatgtatcttttcggtggaaaagaaaccaatagttcgaatgtattaaatcaaatctggcgcggccgtattaaccgtctgggtttttaagtataaagaaagttcgtggaggaccgtataattttatgagtgattcggcgttagaaaagaaggtatagattataacagaaaacgattatgacttcaactttctttcagcgcatactcttattagtccttttggccggttgcatgaccggtcttcacgcacaagaatataaatatgagatcggaggaatggcaggcggagccttttatatgggcgatgtcaacaagaacgcttttttcaaagggttgaatcccgcgttcggagccgtttttcgctataatcccaatttcaggtgggctttaaagaccaatctgatgtgggggcaggtttcaggtacgacggaagggcagcagaatgtttttccggaccatgcacaaggttctttcagtcggagcctgatcgaactgggcgggcagatggagttcaacttctttccgtacagtgataaatttgcgtattcaaacgcaagacgtttcactccctatatttttatgggattgggggtgacggtagcgccgggtagcgggaagacttttgccggtccgaacattccgctcggtgtaggtttgaaatacaaggttaagaacaggatcaacctgggatgcgagttctcgttccgtaagctatttggcgacggtctagacgtgacggacgacagcaatgcgtttctggatgatccctaccatatgaaaggtagttttttgaagaataaagattggtattcttttttgttgtttacggttacttgggatttcggtccgcggtgcaggacttgcaacaatgcgaagaatatagataacatacagtagttatagatgaaaacactatgtcgctgattgaacaaatagataaaaatcgattgccgcagcatgtggcgattattatggacggtaacggacgttgggccaaagcgaagggaaaagaccggagctatggacaccaggagggcgttgtctctgtccgtaaagtcgtggaagccgctacaaccgtgggtttgaaatatctgacgatgtacacgttttcgacagaaaactggaatcgtccggaggcggaggtacaggcgttgatgagcttgctggtcgcagccatccatcgcgagactcccgatctgatgaaaaataacgtccgtctgatggcgatcggcaatctggatcgcttgccggcagatgcatatgccactttgcaggattgtattgcacagacttcagccaatacgggtgttacgctcatattggctttaagttattcggcccgttgggaaataaccgaagccgtgaaacgtctggccagggaggcggtggagaaaaaaataaaccctgacgatataaccgaggctgtcgtctcggattatttgacgaccaaaggtattcccgatccggatttattgatccgtaccggaggagaacaacgcgtcagcaacttcctgctttggcagttgtcatatgccgaattcttctttaccgatgtgtattggccggattttagagaagaagagttgtatggagctatattgtattaccagcagcgtgaacggcgcttcggtaagacaagcgagcaattaatcttataaacaatagctgttatatgtacaaaagaatagtgctgtttttcatgtttctgggatttgctttcggggcttttgctcaggaaactgacactaccaaggttgaagagccggcagaagtgccggtcatttcctattcgtcacctcccaaaaagtataaaattgcggatatcaaggtgacggggattaagaattatgatgatttcgtgttaataggcttttccggtttgtcggtaggggatgaggttactatacctgagccgggcggggcgattacagatgctgtaaagcgtttctggaaacatggactattctcggatgtaaagattctggcaactaaaatagagggagatcaggtttggttggaaatccaattgaaacagcgtccgcgtatttcggaagtcaactatcatggtatcaagaagggggaacgtgaagatctggaagcccgtctggggttgcgtaaaggataccaggtgactcctaacctgatcgatcgtgcgaccacgctgatcaagaagttcttcgatggcaaaggctttaagaatgtggatgtcgaaatccttcagaaagacgatatcgcacatgaaggtgaagtgatcgtagatatcaacatcaacaagaacgaaaagaccaaaatccacaagatccatttcgaaggaaacagtgcgttgactgatcgcgacttgaaaaaggcgatgaaaaagacgaacgagaagttcagcctgtttaacgactggaagagcagtatcttggaagcattcagcacgaagaaatttacgactgaagaatacgaaaacgataagaaacacattatcgagaaatataatgaaaagggatatcgcgatgctgttcttgtggaagacagtgttgtgaactataacgataaacgtgtggatatcttcctgaaagtggaagaaggtgacaaatattacctgaaggatatcaactttgtcggtaatacgaaatatccgacggaacagttgttatatattttaggaatgaaacctggcgatgtttacaaccagaagaaactgaatgaacgattgacgaccgacgaggatgccgtttccaacttgtattataacaacggttacattttctttggtgccgatcctgttgaagtggatgtcgaaaacgactccatctctttggaagtacgtattcaggaaggtcctcaggcgactatcaaccgagtgattattaacggtaacgaccgtctgtatgaagatatcgtgcgccgtgaactccgtacgaagccgggtatgttgttcagtcgtgacgacttgatgcgttcaacccgtgaaatcgcacagatgggacatttcgatccggaaaacttggttccgcaaccaatacccgatccagataacggaacggtggatatccaatacaaccttgtgtccaaggcaaatgaccagatcgagttctctgccggttggggacaaactggtgtgatcggtaagttgagtttgaagtttacgaacttctccatgaagaacctgctgaatccgagtacatataaaggcattattccgcagggtgaaggacagacgctgacgttgagcggccagacaaatggacgttactatcaggcatacagcatatcgtttatggatccgtggttcggaggcaaacgaccgaatacattgtccgtgagcgcctacttctccaaacagacggatatcagtagtaattatttgagcaataacagttatggttataacccgtattacggttatggcggctatccatactatggcggctacggtggctatggttatggctacggttacggttatggcaattatggtaactatgagctggcctatgacccggataagtcgatcatgatgttcggactttctgccggttatggtaagcgcctgaactggccggatgattacttccagtttatggcgactctgaactatcagttgtatatgatgaaagactgggattacttcctggtaaataacggtaactgtcataacatcaacttggaattgaacttgcagcgtaactctatcgacaatccgctatacacacgtaaaggctctcagttcatgttctcggttgccgccactcctccttggtctttatgggacggcaaggactataagaatatgagcgatcaagatgaagccaagttccgtatgatcgaatatcataaatggaaattcaaagcgaagatattctctccgctggctcctctgacagtaaaacgtacgccggtattgatgacgcgtgtcgaatacggatttctgggttcttacaacaagtataagaaatcgccgttcgaaaccttctatatggggggtgacggtatgagtggatactcaagtacctatgcaaccgaaacgatcggtttgagaggttacgagaacggtagtattgccggtaacggtggttacaattcctatggttacgcttactcccgtctgtcgatggagttgcgctatccgttcctgttggaaccgtcttcgacgatctacggtctggtattcgtggaagcgggtaatgcttggagagatttgaaagatttcaatccgttccaattgaagcgttctgccggtgtcggtgtccgtatcttcctcccgatgatcggtttgatgggtatcgactgggcttacggtttcgaccgtcctgatggatacgatcagagaggtggaagcaacttccacttcattatcggtcaggaattttagaaaattgaatattgaatgttcaatatgagatagaaaagacaaccggatttgtttccggttgtcttttttgcgtttgggcattctttgaaccgtacttggcaagtctgttaaattgttaattgtatcttattaattttcaattttcaactttcaaatttcaattctcttatctttgcagtcagaaggtgtaactataaatgacatgtgtatgaaaaagattattgccttaagctgtctgttgttcctctgctcgtttgcagggcacgcacaaaagtttgcattaatagatatggaatatatattgaaaaatattccggcttatgaaatgacgaatgagcagttgagtcaggtttccaaaaaatggcagaacgaagtggatgctatccagcaggaagcgcagaacatgtacaagacttaccagagcgatcttgtatttctgtctgccgagatgaagtcgaaacgtgaagaagcgatcgttcagaaagaacaggaggcacaggatttgaaacgtaaatattttggtcctgaaggcgaactgtttaaaaaacgtgaaagcctgatgaagccgatacaggatgagatctacaatgccgtgaaggaaatctccgaagacaaaggttatcagatggtcatggaccgggcgtcgtcaatgaatatcatttttgcttctccgaagatcgatataagcaatgaagtcctgataaagttaggatattcaaaataaatgcttacatttgtgcgctttaatgaagcaaattaagaatatgattaataacaagtaatattttataggaaaatgaagaaactgattatttttttgttgatgatgctcccgttgggcgtttttgctcaagaatctaagattgcgattgtaaatacgcaggaagtgatccaggctatgccggaatttgcaacgatgcagaaacaaatggctgatatggaagccaaatataaaaacgaaatgcaggtgatgcaggatgaatacaataagaagtattccgattttgttgcacagcaggattcattgacagaaaatatcaaaatgagaagaatgcaggaattgcaggatatggaacagcgtacacagaacttcatccagatttctcagcaggatttccagaagaagcagggtgagttgtttactccgatccaggacaaactgaaaaatgcaatcaaggcagtcggtgacgaaaaaggatatacttatattctggatcctcagattgttctttatcagggtaatactgctgttgacgcaactcagttcgtaaaagccaagttaggtattaactaatataattagcaaacataaaatagcgaagactgaagtcctcgctattatcttttaaggcacggatttcacgtatttacacggataaatttattttctttccgcgttttcagtgaaatccgtgcttgaattatatataaataaacaacttctctcatgttttcatcagtaccaggtccgattggtatcttcgactccggttacggggggcttaccatttttgataagatcagagcagcaatgccggggtatgattatatttatttgggcgataatgcccgttctccctatggtacgcgttcgttcgaagtcgtgtatcgttttacaaagcaggctgtggagacgcttttcaatgagggatgccagcttgtaatcttggcttgcaatacggcatcggcaaaggcattgcgtacgatccaacagcgggacttgccacagtgggacccggctcgtcgggtgttgggcgtaatccgtccgacggtggagctgatggataagatcagtaagagcaagcatgtcggtattttagggacgaccggcaccattacttccgactcctattcgctggaaataaaaaagatgtttcctcatatgacggtgacgggtgaagcctgcccgatgtgggttccgctggttgagaataatgagttcgattcaccgggagcggattatttcgtgcggaagcatttggaacatattttggctgccgatccggagatcgatacgctcgtcttgggctgcacgcattatccgttgctgatcgaaaagatcaaggcattcctgcctgagggaattactttattctcgcagggagaatacgtagccgcgagcctgaccgactatctacgccgtcatcccgaaatggatatccgtttgacaaagcagggaaactgtcgtttcctgaccaccgagtccgctgccaaattctccgatgccgcctctgttttcttgaatcatccggtagaggtggaacagattcgattggttgaatgaataatctgccaatcgatgcttgcacttgtgtgtggaagcacgactggactatctggtgatagactgtccttttctcttaaacgatattttttccgaacggcgaaagagccagtgcggccatcttgaaatgctgtctgccgaaaggaatgccgataatcgtgatgcacagcagtaacccgaaaaacaggtgtgtcaggcagatccagaagccaccgatgaagatccagatcacgttcatgaccaggcacaggcaaccacctgaattaccgttgtccgtcacccggctgccgaagggccaaagggccagcattcctaatttcaatgtctgcaacccgaaagggataccgattatcgtaatcatcagcagcaagctggatatcagatattccacagcggtaagcaacccgccgcagataagccaaatgatattacccaaaaatttcatagcatcaatattataaattattttttactctcatgctgtccaattctgccaacaccgtctgcttcacgatggcaaagctgtcgcgcagttccggtttgaccggcagcgaaggcggagcttccatctgtaacgggttgatcggctgtccgttcttatatacccggaaatcgaggtgaggccctgtcgaaagccctgtcgagccaacgtagccgataacctgtccctgctcgacatggctgccgacttgtatgtctttggcatatttgctcaggtgcatataggaagtcgtatatacggagttatgttttactttcagcgtatggcctcctccgcccatatagcctttggcgatgacggtccccgctccgatactcttgacttccgttccgacgggagccgcatagtctactccatgatgtgcccgatagcgtttcaggatcggatggaagcgggcgttcgtgaaacgcgatgtgatgcggaagaagtccaacggagccttcaggaaagccttcctgaggctgttcccttcaagatcgaaatattcgaaaacgctatcctgggtgaatggtatggctgtaaaatcttttccttgatgcgtgaagacggctccctcgatggaggtgatattcagggctgtcgtgtcgtctatataggcaacgtcgtacaacacccggaatgagtctccttcttttacatcgaaaaagtcgatctgccaggcatatacatccgaaatcttgatcgccagtaacgggtccgctccacttgccttgatcacgttccaaagggaagaattgattgtcccttctgtgtaatggcgtttgatggtaataggcttgttgaattcgtatgccaggatcgaatcgcctgtcaggtcgatgacggcataatcgacaagtgatttggcaaaggcgatataacgtatatcggcaacgctgtcctgagttgtaaatgtataatagttcatacccgcacggagtttggtcgggttcagaacatggatggaggctttcgtaatgctgtctgctttcaaggcggagaaaccgcgggctgaaaagattgcggcgggattatcgccgtttctcatcttgtactccgtcacgtccaacgagtcgatgcagatgccatattgatatacgtgttgcaggctgtccagccattcgctgtcgactccttcttcttcgggttgttgtttcgtatgtgtgcaggaaaagcaggtaagcagtcctgcgagtaacaaatataggacgatgctcttattcattctccggcttcttttttcatctctgttagttcttctacctgtttttgtgacaattgaagtgccttttccaggtcttccactttaaatccttttctattcataaggcaaacgaggttgcgtccgtgatgtatgctgctgtcgttcaataaatcttttgtgtccatatcatactattttatacgttgcaacaaatatacaaaattaatctgtaagccttattaattgaccaactcctttgtcggtggtccggatattggcgaagcataaatgttgataccggtaaatcatcattcggattattattctacaaacttattattgattgtgaaaacaactgtcatactatcatactttgcttttggcagtatgaatatcaatacttatgtggaatgatagtaggcatgatggatgttttttcaactatcataccatcatgaaaacaataactttttcacatgtaacatatagcatattttcagcaatatagttacatttttttgtcgagacccgggtgtcagacgtctgcagacccgggtctcaagaccgctcagatggaggtgtaaatggctctgatacgggcattttgaggaaaaaatctaacgtctttcttataaaaaagtaacgtgttccggcaaaaaaggcttatgctttcctgaaaacattctgtttttaacacttttggagtgtatctgtttcgggtaaaacggctaaaatgatggttaaactgctgatttatgatagttgcatgatagttaaaaaggaaactgtcatgcctatatgttatgatgttcaagttatatacaagaaacatgatagtatgatagttgttttttttaattcattatagtactgataagtttgaaccgtaaatgcagatttaccggtgaactaacgggtaaggctgaacctcgtgccgcaagctctcttttgccgtctgctttagctgatgaatagatgattgttcccggctttgccggttcctctgtggttttttaacccctttaaatacaatacaagctgtgaatggggtgtaagaatggttaatgaatattaaataatgagcttgtcgggaactttttgcaatgattcggcgtcttatatttacgagtgattattataaatgaaaaagtaaaaaatgaaaaaagctattttgacacttttgatgattcctgcttttgtcgggatgttgttttcttgctctgaagtcaaaacggatgcaaagaagttggaaggtaaatggaatattgtggaagtaaaaggagaaaaaatactgaaagaaggtttgcccaatatggagtttgatatgaaagataataaagttcacggtaatgccggatgtaatatctttaattcgactgtcgtgctggacgaccaggatatttcttccatcacgatcaaccccgcagccactaccatgatggcttgtccggatatggagatcgaagatgcgatcttgaaagctatgggaaacgtgaaaggtgtgaaggccggccagtccgaaaatgaaatgttgctggtcgatgctgacggtaacgtgttgatggttttgtcaaaaaactaattggatagaaatgaagaagtacatgtatctttgtcttgcggcgttgagtatcggtatctttgcttcttgtaaggcgaaaaaaggtgtggaagcgactttctccgacctggatggtagttggaatattgtcgaattgaacggcaaggtgttgaatcctgccgagacgaatcaagtcatcgagttcgacgtggctcgccattccctttccggaagagctggatgcaatcggatgatggggcagatcgaatacagcgattcccgcaagaatatcattaaattcccgcaggttgcgacaacgcgtatggcttgtccggatatgagtggtgagcgtgaattgttgcaggctttggataaagtcgttcgctttgatgcagtaggtgaggtgaaaccggtcaataaaatcgctttatatggcacggacaataccaaattgatggtaattgaaaagaagtgactttcattgtgaaatgtttggaaggcggttccggttgtgacgggccgccttttttatttcggcctgcaagggatgatcagggtgaagcggctgccttttccttcctgggaagaaagggtgattcgcccctccaggcgctcggcgatggtttgacagatcgataggcccagtccggtaccttgtgcaaattcgtccaccttgaagaaacgttcgaacactttcttctgggcctcttccgacatgccttttcctgtatcttcgacaaagacatgaacttctttctcctccttcttatagacagctcctaacaggatgtgccctttagtggtgaacttgacggcattgttgatgaaattcgtaatcacttgcgtgaaccggaaacggtctacatgaatgataagttccgtttcttggaattctttcaggaaacggatattcgacggcataagcaggtgatgtgtctggtagatctcttctaacagttcgtttagagagcaatcgtcgaaagcgaaagacatccgtcccgactcaatgcgcgagagttccaggatatcattaatcagtttcagcagcagattactgtttttgttgatcgtattgcggaaaaggtctttttcttcatcggtcaattccttttcgtcttgtaataggttggtgaaaccgactatcgcatttaacggtgtgcgtatctcatggctcatgttggcgaggaatgccgatttcatcttattggcttcttcggctcgctctttctcttcgatcaaccggagttgcacctgccttttccgttcgctttcgcggtagtacatgtaaatgaggtgaaggatgatatagacgattgctatgacgagcaggattccgcctgcaataatatagtttaggtaacggacttccagtggcatgttatagatgatgcttccctgtggcagatcgctcaaccgtatgttgaaacgttgcatctctttccagtcgaaagcaaatgttttggggctttctacgataggaatgtcatttggagaagtgcctttcaggatgcgggcagctgtttgggcaacacaatcagcctggatttgcaaggtagtgaaatagccaccggtgatccctctgttgtcgttgaacccgttgttaatgactgtgaagttcggcacattggccaggcgtccgacggtcaggacattgaagtcgagaatgatttgtatgcaggcggtgtaaggcttgtcttcaaatacccaaagaagctggcgggcggtcaggttggctgttgaggtcgtatataaggcagaagcgccttctttgccgggctggatttccgtggaagtagtttggggccttgtttgatacaatccttcgtaaacagctattccatgtccctggatattgtccatcaacgtttcgaacgcttttctgccgatgaattctttcgttttgaagatcagtatttttgatcttccgtatagtttttcgatcagttgtatgtttttcagatattcaggcttgtcccaataacccgtgaagttgggatgctgttccaatagttcccagttgggaaagttgacacctgaaaagacaaccggaatcgtcttgccgagcggatggttgcaggccattaaagtataggtagcctgatcgtcattggaaatgatgatgtccggtttgaaacttaaagtgtcgagaaaggagtacatccgggcttcttcgtctgtggcattatagcgttcgcagtccaggtagaatgtgtggatggaagagtatatctgcttttcctccagttcctcgtgcagcagcttgtcgaacttggagtaggcactcaggctttgattgtatgactgtatgacaaggacattaaacagttccttcccttttttatcggaggaaccctttgcttcacgcggaaaacaaagggccaatatcaatatcgctatgtatatatgtattttcaaggaagaagcacttatcaattgtacccgtatgttttaaaaaaccgttcaaagttaacgataatcgggatataacaagtacttctttctgattttcttatatttatttaatgccggttgccaacttgcgcgtatttcgttctcctttaagccgcggacaatctggaaacgtaattcttttgtcccggcaagcaggtcgaaccattgtgggcgggtgaagaaaaaagcttggtcgttgcctgctttattatagaaatcaaggaggaatttcagcgtcaatcccccggtaaagggatattctctcaagtccgtgccgtagcattccttgtccttatgcaacggtttcgtgtcgaaacctggcaaggaggtgggcgtaaaggtgaaatctccgtatctggcatcgggtgctcccaatatctggaatggataataggtcccgcgaccgacactgatattggtcccttcgaagaaacagagtgaagggtagagacggatcgactggtcgttcggcaggttgggagagggctttaccggtaaccagtacggatctccgtgacgccagttttccatcttgacgatatgcagtttacaggtgtcgggagtacttttcagccaaccttccttgttgatcatccaagccagttcgccaaccgtcagaccgtgcagtatgggtaatgggtcaacgccgacaaaggattcgaatcctttctggcggacaggaccgtcaacgaagtcgttcgggttagggcgatccaggacgataaattcgacatcgttttcggcacaggcttccatcacataatgcatggtgctgatgtaagtataaaagcggactccgacatcctgaatgtcgaacacgaccacgtccaagccggccaactgctcggctgtcggcttcttgttctttccgtatagggatatgatggggactcctgtttttacgtcacggctgtctttgatctcggctcccgcatcggccgtcccgcggaaaccgtgttcaggggcgaacactttctttatgttgataccctcttccaacaaggcgtccagcaaatgcttctgctgcttttcgaggatggaggtttggttcactactaatccgacctgtttgtctttcaacagacgggtaacgacgtccatacgttcggctcccaattttagaggggctttctgtggagtgacggcctggatttcagacattaagaacaggcttaacagccagaaggcatacctgataactgttctcatagactcattccttactatttgtttctgcaaaagtaacgattctttttgtttattgcgtatctttgtctctcaataaagcgattgattgttatgaaccctttagatattattgccaaatattatccggtaggttcggaggcgtaccggattttggttattcatagtagaagtgtggcagataaagctttggctatagcccggatgcatccggagatgaatcttgaccttacctttgtagaagaggcagctatgctgcacgatatcggtattttccgttgtaatgctcccgatatcgattgccatggagatgcggaatatatttgccacggttatctgggggccgaattgatgcgggcggaaggttatccccgccatgcccgcgtgtgcgaacggcatacgggaacaggtattacgctggcaatgattgaagaacgaggtttgcctcttccgcaccgggactttatgccggaaaccttggaagaacaactgatttgctacgccgacaagttttacagcaaaacgaaactggacaaagaaaaatctgtcgaaaaggtaaaacagggcctttcgaagtatggaaacgaaactgtcgaacggtttgataactggtgtaaactctttttaggggaataaaaagggattggctcgctaaattgttatacatttgcccgctgtaacacactgcaaataacgacggaatgtttttgaaatacaaatgcctgattattttgttgcttttcctcactggaaacatgatgactgaggcgcaggaacttatagtcccgaccgataccgtgatggccgttgtgggcgatacggtcgtatctgccggacaggatagtgtgcttgcgttagacagtgtaccgaagaagcagacagggctggacgctccggtttcctaccaggcgaaagactccatcatcatgacgggagcgaactgggcttatctgtttggggaaagcgatgtgaaatatcaacaaatcgaacttcagtccgagaaaatcgagatgaatatggacagtagcctggtgtatgccactttcggcctcgactcgatcggggaggaattcggctatcctcttttcaaagatggcgaccaacagtatgaatccaagacgatgcgctataatttcggtacgaaaaaaggatatatcacagatgtgatcacgcaacaaggcgaaggttatgtgacggccggacgtaccaaaaagatggacaacgatgtcctgaatatgaaggggggacggtatacgacttgcgacgagcatgatcacccccatttctatatccagatgacgaaggcgaaagtccgcccgaagaaaaatatcgtgacgggtcccgtctatctggtgtttgaggacgtcccgctttatccgatcggtctgcctttctgtttcttcccgttttcgagttcttattcttcgggcattatcatgcccactttcggggatgaaagttcgcgtggtttctatctgcgcgacggcgggtattattttgcgttgagcgattatatggacctggccttgaccggtgaaatctatacgaaaggttcctggggactgtcggctcgttcttcttatcggaaacggtataagttttcgggcagtttcaatgcctcctatctggttacccgtttgggcgacaaggggcttcccgattatagcttgtctaaggacttcaagctgaactggacacactcgcaggacccgaaggcaaatccgtaccggactttctcggcgagtgtgaactttgcgaccagcagttatgaccgtaataacctgaacagcttctatcctggctcgcaagggtttgcggatgcgaaccagaataccaaagggtccagtatcagtataacacagcgtttcccgaataatccgttcagtatttcggctaccatgaatgtgaaccagcgttcgaaagactcgacgatctcgctgacattgcctgatattacaattacgatgagccgtatcttcccgttcaaacggaagaatgcggtcggcaaagaacgttggtatgagaagatttccatgagttacaacggttacctgcgtaatagtatcgatacgaaagaagacaaattgttcaagtcgagcttggtgaaggattggcggaatgccatgcagcaccagattccggtgagtgctactttctctttgttcaagtatttgaatatctcgccgtcgttcaattataccgaacgttggtacaccaataaggtggaaaaagcatacgacatgcagaagaagcaggtggttgcgcgtgatacgacttatggtttctaccgcgtatttgattacagcacatccgtttcagcttccaccacgctatatggtttctataaaccgttgccgtttttgggtgacaagatcaagatgattcgtcatcgtttcgaaccttcggtaacgttgagttatacgcctgattttggagcttccaaatatggtttctggaaagatcttatgtatgaagatcaatatggacagacgcagcagatctcttattcgccgtttgaaggcggtatgtttgggacggcccctaacgggaagtcggggagcgtgagttttcagttagataacaatctcgaaatgaagatcaagtcggatcgcgattcgacaggtgagcgtaagatcagtctgatcgataagttgtcgttggggatgagttataatatggcggccgattcgttcaagtggagtgacttgagtgtaggcttgcgtctcaagttttcgaagagctatacattgaacctgaacggtacgttcgatacctatacctatggctacgatgaagcgacgaagaccgttcgccggttggatattccgcgttggcaggccggtaaaggattaggccgtttgcgccagaccggtacgagtttctcttatacctttaataatgatacgttcggcaaattgttcggcaagaaagataataacgacgattccaacaaccctccgacagaccccaatgcatcgaacgatccggaattcgaacaaatctcttcgggagaggaaggggaccaacagggtaaaatggaaggaggccgattgcgtggtgccaagaaagatacgggtgagttcgattcgtatggctatatggtcaataaagtgccctggagcctttcgttcagctatagcatgcaattgcgttatggagactttgacccgagcaagctcgaatataagtacaagcttacacatgcattgagctttaacggtaatattcagccgacgaagaactggcgttttaactttaatgccacctatgacttcgatacgcataagatatcctatatgacttgcaatatcactcgcgacctgcattgctggcagatgactgccagttttgtgccggtgggaccttataagtcctataccttcaatattgcagtaagttcgtctttgctgaaagacctgaaatggcgccagagcagcaactatcgtgacgggcagaaatgggagtaattccaattgtcaattgataattaccaatctattggtgtctgtccggttgcgatcagataatcatttgctttgctgaaatgcttgttcccgaagaatccgcggtaagcggagaggggagacggatgagccgatttcaatatcaggttgcgggaggcgtcgatgaaagcgcctttccgttgtgcatacgacccccacaggatgtaaacgatatggcttcgctcttctgtcaggcggtggattacggcatccgtgaattcttcccaacctttattctggtgtgagccggcttggtgtgcacgaaccgtcagggttgcattgagaagcaggacgccctggtccgcccaacggagcagattgccggtttgcggtatgggtttgcctaaatcgctttcgatttctttgaagatgttgacgagcgacgggggaaagggtgtcccgtcttggacggagaaacaaagtccgtgtgcctgtccgggttcatgataggggtcttgtccgagaatgactactttgactttgtcgaacggacagtgttcgaacgcactgaagatacagggaccaggaggatagatggttctttggcggtattcttctttaacaaaggtgatcaactggctgaaataatccttttcaaactcagaacttaatcgttctttccagctctgttctatcttgacgtccataacggtaattgaaaattgaaaattagaaattggaaattggaaattggaaattctctttattacgcgaatatcagaaataattatcaataatccatccttaattttcaattttcaatttttaattatcaattagatcaagtacataccggcagcacgggcttcacgacgcatttcttccggccatatacttgcttgaatttcaccgatatgggctttgcggaggtaaaacatacacaagcgactttgtccgatacctcccccgatacttagaggcagttcgttgtttagcaagcgtttgtggaaatatagttcttttttttcttccgcgttgcaaatctccaactggcggagcaaggcttccttatccacacgaatacccatggaggacagttcgagcgaacggttcagtacttcgtcccagacgagcaggtcgccgtttaatccgacttgtccgttttctgcaattgtcgaccagtcgtcatagtccggagcgcgtccgtcatgtttctctccgttgcttaacttacaaccgataccgataatgaaaacggctccgtattctttcgtaatcgcatcttcccgttctttcggcgtgaaggtcggatatttttgcaataaatcttcggagtgtatgaaatggatttgctggggcaatgtaggacggatttcgggaaacatctcatagaccagatattcggtacgtaccatggctgcgtagatgcgacgtacgatttctttcagaaaatctacattccgttcttcggctcccatgacgcgttcccagtcccattggtcgacatataaagaatgtaggtttcccaactcttcgtcagagcggatagcgttcatgtcggtatagataccgtagcctttttcgatttgataatcagcaagagtaagtcgtttccatttggcaagcgaatggacgatttcagctttggcatcgtccaaatccttgatcggaaacgtgaccgcacgttccgttccgttcaggtcgtcattgatacccatcccttttaaaacgaacaacggagcagtgacgcgccgcaaccgtaattcggaagacaggttttgctggaaaaagtctttgatctttttgatacccatctcggtctgcgataagttcaataaagccttatatcctgctggtttaattaagtaactcatatacttgttgtgctttatgtttgtgaataatgtgtggcaaagatactaattaatggcaaaatagcaattatgtgcctttttttatttgcaaaatggaagtgattatcgttaggatgcttgcaaaatatcaaaagtaatctttttttgtccgttcatttgttttcctgcaagattatatatacttttgcgctgtctttggctgggtagcttagctgaatagagcgtcagattccggttctgaaggtcgtgggtttgaatcccaccctggtcacaaaaggatttccaagtgttggaagtcctttttttatggggttacgcgtaaacttttcttttttatttatgttttataaatgaataactaatttaagaaagaacaaagattatgtcagtggtttataaatttctttttcctgccaagccggtaggaaatgctttttctctttttttgttggcgttgcgtatccttttcggagtattgctgctttcgcatggtatccagaaatggacgaattttagtgctatgtcggaatctttcccggatccattgggtgtaggaagtacgttgtcgttggggctggctgttttcgctgaggtattttgctccgtaggctttatattcggtgcgttttatcgtctggctatgatcccgatggtctttacaatgggaatggctttttttgtgatacacgggaatgatccgtttgccgtgaaggaactggcctttatttatctggtggtatttgtgctgatgtacataacgggaccgggtaaattttctatcgatcatgtcatatcttctgcattatataaaaagaaacggtgaggttctataggggaagccgttaggtgtatacgaaaggaaacaaaaaggcgggaattattattcctgccttttttgttgtgttagccttcttttaaagaatagtgggagaataaggtgtttctttgtgttggttgggaaataaaaaaagcaatcatgtaatcatgattgctcttaaaaaaagtgggcgttgacggattcgaaccgccgaccctctgcttgtaaggcagatgctctgaaccagctgagctaaacgcccgaatatgaaatcattttggtgatgagtgggcgttgacggattcgaaccgccgaccctctgcttgtaaggcagatgctctgaaccagctgagctaaacgcccaaagtgaaatcaattcgttatgaaaggtgggcgttgacggattcgaaccgccgaccctctgcttgtaaggcagatgctctgaaccagctgagctaaacgccctttcatttgttcattaagtttgatatgctctatctctctaaagcgctgcaaagatacggctttttttattacctccaaatatttttgcgaaaaagtagaaaaaaacttcatctccgcctatatgtattaagatttatagtaactttgcaactccatattaataatgtatatgatattttcgacactgacagcaatttcgcctgtagacgggcgatatagaaataaagccgagaacctggcggcttacttttcagagtatgcgctcattaaatacagagtgcaggttgagatcgagtattttattactctgtctgaattcttaccgcagcttcgtgcgttggcgactggggagaataaagaggctttgcggaaaatttaccgcgagttttcggttgaggacgctacccgtattaaagagatcgagagtgtgacaaatcatgatgtaaaggctgttgaatattttataaaagagaaattcgatttgttgtctttgcaggaatataaggaatttatccatttcggattgacttcccaggatattaacaatacatccgttccattgtctatcaaggatgcactgaacgaagtgtattttcccggtttgcaagaagtgatcgacatgttgaagaaatatgccgaagactgggcggatgttcccatgttggccaagacacatgggcagccggcttctcctacccgtttaggaaaagaagtgatggtgtttgtttaccgtttggaacaacaggtgaagctgttgaaagcgactcctgtttctgctaagttcggtggagcaaccggtaatttcaatgcgcatcatgtggcttttccggaatatgactggaaagctttcgggaataagtttgtgaatgaagtgttgggactgagccgtgaggaatggacgacacagatttccaactatgacaacatggctgctatttttgacgggatgaaacgtatcgatacgattttgatcgatttgtgccgtgatttctggcagtatgtttctatggaatattttaaacagaagatcaaagccggtgaggtcggttcttctgctatgccgcacaaggtgaatccgatcgacttcgaaaatgcggaaggtaatttgggtatggcaaatgctatcttgacgcacctggcaaccaagttgccgatttcacgtttgcagcgcgacctgacagactctacagtccttcgtaatgtcggtgtgccgatggctcatgtcgaaatcgcattcaaaagtttaacaaaagggctgggtaagttgttattaaacgagaaagcattgtaccgggatttggataactgctgggctgtagtggccgaaggaattcagactatccttcgtcgtgaagggtatccgaaaccttatgaagcattaaaagccttgactcgtacaaatgaagatatcacagccgaatcgatcagtaattttattgatacgttgcaggttagcgatgctgttaaagctgaattaaaggcgataacgccgcataattatacaggtatttagtgagaaacaatgggtagccgtgaggttaccaagtagttaattatcatttaatttacatcaaatgagcacagaagaaagagatgaatctcaaccgcgtccaagaaaggtgataccaagtatcagacgggaaaacacagaccaggattctgaaagaagaccttacaatcaaggttataacagacctgagggaaacaactatgaacggagaccatataaccgcggaggttataattcttatggggacaaccgctcttatggagacagaccgagtcgcccgcgtacgtatgataaccgtgatggcggttacaacaaaccgtataaccgcgataatggtggaaaccgtagctatggcaactctaatcgtgaaggcggctataacagcagaccttcttacggtagcaatcgcccttatggtaacaacgatcgcccttcttacggcaatgaccgttcttatgggaacgatcgtccgtacaatcgtccgtctcgcccgaactatgaagacagaggaaaggcttattcggctactccgtccggcgaaggtgtttcgggtgatggtgtaaagaaaagaagaccgcgtgtaggtgatacccgtgtaagttcgtcttatgataatcgcgataatcgtggtggcagaccttcatacggtaataacaacaaccgttatggaaatggcggcggacgtggcggctacaataacaacagacgtccgaacaacaatcgccgtaccggtgattacaatccgaatgccaagtataacttccagaagcagttgaagtataaggaagtgctggcagatcctaacgaaccgatccgcttgaataagttcttgtccaatgcaggtgtttgttctcgtcgcgaggcggatgaatttatccaggaaggagttgttcaggtaaatggtcaggttgtaactgaattgggaacgaagattacgcgtcaggatacggtgttgttcaaagaccagccggttcagatcgagagtaaagtgtatatcgtcctgaataagccgaagaactgtgtgacaacttccgatgatcctcaggaacgtctgactgtcatggatttggtaaagaacgcttgccaggaacgaatttatccggtgggacgtctggaccgtaatacgacaggtgtactgttgctgacgaacgatggcgatctggcttccaagctgacgcatccttctttcaagaagaagaaaatctaccatgtatggttggataagaacgtatctatcgaagatatggaaaagatcgctaacggattagagcttgaagacggagaaatccatgctgatgccatcagttatgcaagcgaagatgataagagccaggtcggtatcgaaattcactcagggcgtaaccgtatcgtccgtcgtattttcgaatcactgggctatcacgtggttaaactggatcgtgtatattttgccggtcttacaaaaaagaaccttggacgtggaaagtggcgttatctgaacgaacgtgaagtgaacgcgctccgcatgggggctttcgaataatatagagtttagccggttggaaaagccggctaacttgttttgattacctaagaataaaaatataaacatggaagcaattaaaagaacaaaaattgtagacgtactgaaaagcgaagctttcggtacgaccgttaacgtgaaaggatgggtccgtacccgccgtggtagtaaacaggttagtttcatagccttgaatgacggttctacaataaataatgttcagatcgttgtagacgtggacaagctgggcgaagaatttctgaagccgataacaacaggtgcgagtatcagtgtaaacggtacgttggtgcagtcgcagggaaaaggccagaatgtggagatccaggctactgaaatagaaatttacggttctgccgatccgaatacttatcctttgcagaaaaaaggccattcgatggagttcctgcgtgagatcgctcatctccgtccacgtacgaatacattcggtgcggtgttccgtattcgtcataacatggcttatgccattcataaatttttccatgacagagggttcttctatttccatacaccgctgatcacagcttccgactgtgaaggtgcgggtcagatgttccaggtgacgaccatgaacctctatgatctgaagaaggatgaaaacggatctatcgtttatgataacgatttcttcggtaaacaggcgagcctgaccgtttctggacagttggaaggtgaattggcggctacggctttgggacagatttatacattcggtccgactttccgtgcggaaaactccaatacgccgcgccacttggctgagttctggatgatcgagccggaagtggctttcaatgatatcctggacaatatgcagttggcggaagagttcatcaagtattgtgtacaatgggctttggacaactgtatggatgatatcaaattcttgaacgatatgttcgataagggtttgatcgaacgtttgcagggagtgttgaaagacgatttcgtccgtttgtcttatacggaaggaatcaagattctggaagaggccgttgctaaaggccacacgttcgagttcccggtatattggggtgtcgacctggcttctgagcatgaacgtttcctggttgaagagcatttcaaacgtccggtaatcctgactgactatccgaaagagatcaaagctttctatatgaagcagaatgaggacggcaagacggttcgtgcgatggatgtgttgttcccgaaaatcggtgaaattatcggtggttccgagcgtgaagccgattatgacaaactgttgaaccgcatcaatgaaatggggattcctatgaaggatatgtggtggtatttggatacccgccgcttcggtacggttcctcattccggttttggtttgggcttcgaacgtctgctgttgtttgtgacaggtatgacaaatattcgcgacgtgattcctttccctcgtacaccgaagaatgccgatttctaatttcgcatagaattgaaaaatcaaaactccgcatagaacgttcagaggactatgcggagttttttatttaatcttcatcttccaagtcgattgggatctgccgtttgaacgcttccttgaaagagatcagcgattcggttcgggcaaggcctaacggttgaagcttattatggataatgcttagcaaatgctggttattctttgcatatatctttatgaataaatcatattgtccagtcgtgtagtgacattcaaccacctctgggatttccttcagagcctccgtcaccgatggaaactgcccgggagatttgaggtacaaacccatgtatgcacaagtttcataacctacttttgtgttgtcgacgataaattcagatcctttgattacacccaggttggtaagtttttgtatacgttggtgtattgctgcacccgatacattacactcccgtgcaacttcgaggaaaggcatacgggcattgcctatgattagttttaatatcttctcgtcaagttcatccagttgatggtgtgccataatttatctatatttgtatatctgtataaatcagttcttacaatcttaatacaaatataaataatctctaatgattaacctctattttttagtggaatattttagtttgtaagtttctttagtaataataatcttcaattttatagttttatgagtttacaatcagtagtagcatgtaggtctgtaaaagacttttctgatccggtattggatctgatagagagaacgtacacagaatcttttccggaagtggaacgccgtgacttttcgcttgtccgcaatttggttagagacgaatcccggtttatcgtgtatgctttatcaaaagaagatcggtatgtcggcttcatcaccagttggctttttgacggttatacttatgtggagcattttgcaattgatccggcggcccgtaatggaggaataggggctgaggcaatgaagcaatttctggtcttctgcggtactccggttgttctggaagtagaaatgcctactgatgagatgagcaagcgcaggattggcttttatgaacgtttgggctttaaactggacaatcaggtttatcaccagcctccttaccgggaaggtggagaatggctggagatgcggcttatgacatatggcgatgttgatctggagcattctttcgagctggtgaagaattgtcttcataagaatgtgtatggagtgaaagatgggctcacccggtgatcgttttgcacattgcctatttgttttctcgttctaattcgacgatttaagtggcagtagccatgtttctgttgtcaaacagtccaactgtagagcttttgcccttagtcgaatgtgctttcgcccttggtcaaaagcgctttcgactaagggcaaaaaccttttcgaccaagggcgaaaagtaaaaaagtagtagctattgctgtaaatagctatgtgtctatttattattggatgggtgtcatctcctttgagggaaagggctctgatcggtgactaaaaggcaataaaaaaggcggggttagaaacctcgccttttttattttgtatatccagagattagtcagcagcctgacgggcagaataactaatcttcaatgcgtatgcttcacgaagcgcctgcttaacgtctgtgatcagacccatcttggtttccttatcggccttgatggacactgtcataaacggctggtcttcttctttcatactggatttttcctgagcgatgtagtcctgaatttccgatacttcagcgaacttgtcgttcaactgcaagcgggcttcagaacccattttagcctgatattcctgggtcggctttcctacatagatgaatgtaaccaacgatttcttttccagcttctgaagttcagtagcctgtggagcgcggaattgcaccatcaatgttacttcacgcatggatgttaccatcatgatgaagaacaagaatgcgaacaccaagtcaggtaatgatgacgtattcaattcgggcatttcacgtccgcccgctttactaaactttcccattacttcttatctccataatttttaggttctgcctcagaaatcttttgcggataaatctgctgcacagccttttgttggtcttcatctagatctgcgaataattttccgaatttctttctggaaatatcatcacgcaattcgttgtatgcctttgccaattcgttctgaacgctgatataagcctgatattcggtaccacggtcattctgtaaagaaattacgtgttttttagcggtcattacttttccgaagaaaggaacgtcctcttcaaccttttcaggtttatttgcgtcattatacgggttgtcaatgaactcttttaccttgtctttcagttgcttgatgtcggtaggttcaccgttaaagaggatttggttactgctgttgatcagcacgacaaccaagtttctcttgttaacatcaacatcattcttcttttggtctttaggaacaggaggcggcaaacgtcttgccagacctttatctgtatccatggatgtagtaataaggaagaagataagcaacatgaaagcaatatcggctgaagacgatccattaatacccggtgtctttcttttactacccatttctttcttgttttatcaattcgttattactattatttaccgagcattcttttgacagaaccccaaaccacacatgcaacgattaaaaccagcaggacaactgtagaccaaatccacatatctgtgatttgcaaccaaccggctgtgttatatttctgagaatctgcattcagaccttgtaacggagttccatcaccgattgaataagtgataaacagcattgcaacgaaagcaactacgacacctaaagcagaaagagctgatttaggattaactttcagcagggtgataaactgccaaacagcaaataacaccatgcaaatgattgtgacgaagaataatgctgaagtccaattaagcaaaagacctgtatatacatattctttcatttcttctcccggattcgtgatgcctccgccgaagaacatacccagaacgacaatactgataagcgatactatcagtaatgtccaactggacatttttcttattttagtaactgccatagttgtttcttattttttaaatttgaggttatatttaataactaagtccagcaaagtgatagaagcatcttccatctggttcaggatagcttccagtttgctcaacaaatagttatagaatatctgaaggatcaaagcaacgatcaaaccacctactgttgtgatcaaggccactttcataccacctgctacaaccgtcgggctgatatcaccaacctgttcgattttatcgaacgccatgatcatacctactacagttcccaagaatcctaatgacggagccattgcgataaacaatgtgatccaagacatgttcttttccaaaagaccaccctgaacaccaccataagaaacaatagatttttcaacaacatcaataccttggtcgattctcatcaaaccctggtaagcgatagaagcgataggacctcttgtgtcacgagcaatagcttttgcaccttctacatcacctttatccaaagcatcttcgatacctttcagcaatttgctggagttagtttcagccaagttcaggtaaatgattctttccaagcagaaagccaaaccgaaaatcaatgcgatggcaaccaaactcatgaagtcggcaccaccttcgataaacttagtcttcaaagcctggtacatgccaccttcaacagcggtttcggtagcttcttgcgcgaatgctacagaagagattccaagagcacataaactcatgaacgtttttgcaaaatactttttcattgtgtgtttaatttttaagattaataattctcttatttgtttttattttttgttattaataatcgtcatggtatcttaaagcggagagagcgggattcgaacccgcgaaaccctttaggggtttacacgctttccaggcgtgcctcttcaaccactcgagcatctctccaaaaacgagctaccgcttctctaaaacgggtgcaaaatacgaaaaaaatcgcatatccaaacgtttcagtgcacaaatctatagtttttgcctgacatatacacaatatctggtggataaattttgaatacgcgcgaaaatatctcacgatattggtttattctcgattttaaatagttttagagcatttatccgtgttgtttcaacggtctcttcgagtgtcagtccataggtctgggctactttttcagccgttttccagatataggccggctcgttcctttttcctctgtagggaacaggggcgagatagggggcgtctgtctccaatactatttttcggatgtctgtctgccggatgatttccgacagcctggagtttttaaatgtaatgactccatttatcccgattttgaaattatttaattttttaatctcttccaattcggcttcattaccggtaaaactatgaaagactccggtgagcgtgtcggctcctaccttatatagagaatcgaaaacttccgggtatgcttcgcgggtatgaatggcgaccggcaggttgaggtcgatgctccatctgagctgttcctcgaatacttctttctgctccttcaggtatgttttgtcccaatacaggtctatacctatttccccgattccgcaataaacacgtttaccgagccatgactctgtctccttcagattttttgcataatgctcgtcaacgctggtcggatgcagtcccatcatcggataggcgaaatccggataacggtcgcataagtcatgcatccgcctgatggtgctcgtgtcgacattcggaagtagcagggtgtctatgcccgactcttttgcgattgtgaccagttgatcctgttccggatcaaaatcctctaagtacagatggttgtgtgtgtcgatcagtttcattttaagactggcggttcattaaacgggcgctgacttctttcagtatgtttagcctttcgggagctacgtttaatgaggttaggcagtttattgcctgattataatatgcgtgtattttttcttcggacaactcttttaaccgcaattggtcatagatggctgttacggcggcgattttctctgccggatcgaatgtctttttacctatccagctgttcagttccgctttttgagtatttgaagcaaggcgtaaagcgttgatcagcatgaatgtctttttgttgcagagtatgtctcctccaatatttttgccgaaggtggccgtgtctccgtagacatccaacaggtcatcctgcaattggaaggccagtccgatgttgatgccgaactgatacagcgtttcagcatcggctttcggagcgttccccatgatagctcccatcttcagggcacaggctagcaatacggccgttttcagtcggatcatttcgatatattcctcttctgttacatcggttctcgattcgaactccatgtcgtactgctgcccgccgcatatttcaagcgccgtacgggtaaacaggtctaatatttcttttaatgattcggattctgtttcgccgatcagttgataggctgcgatcagcatggcatcgccggataggatggctgtgttggcattccatactttatggacggtcggtttgtttcttcttttatcggcatcgtccatcaggtcgtcgtgcaaaagggtgaagttatggaatacttcaagccctaacgccggattgacggctgtatctacgttttccttatataagttacatgccatcagtacgagtgccggacggattctttttccaccgagtgaaagtatgtactcgatcgggtcgtataagcttttgggcggataggtgaattggagccgggtaatttcctgctctattttctgtaggatgtcattgaaagcgaacatagattatttgtttaaataaaaaaggctgcgatagaagcagcctttttgtactatttacatgttattattgcagtctgaatgtaacaggcactgtgtatttaacacgtacgggtttacctctctgtttgcccggtgaccatttcggcatgctgttgatcacacggagagcctctttatccagtgacgggtcaacaccacggataacttctgcgtctacgatagaaccgtctttgttaaccacaaacgagcaggatacacgaccctggataccgttttcctgagcaataaccggatacttgattgattttgccaggtattgtaacaaagctccttgtccgccggggaattcaggcattgtttctacaacagtaaagatctgctgtgaagattcctcttcttcttcaactactgcgggaggagtataagcttcaacctgtgcagaagcggcatcgtcttcggatgatacgatttcgacgtcgtccaacttgacgtcatcttctacaacggttaatacttctgccacagcaggtgcgggaggtggcggtggagggggaggagtgtcctccggtctcgtaatttcaacttcttcttctgcgatgatatcagcaacgccctgatcttggacgattgtgatttcacggtcgctccattcgaagcccacgaacagtactgcaagtccgacgatcatacccatcaggatacccatcgtcttacctttttccaggtccgctttcggtgatttcttaacttccatatctcttagtgtttaaagatgtgtttttcttctgcgacaaatatacggagttattttttaaatccgaacaattcgtattaaatatacgctatttttactttttttttgactgagaataaaaataatagctcccaatatacctttttcggctttttcccgtttctgtaagtggggtgtatgtacccgttttatttatctttgtatgcattttaccagagaaatatgagaaatattctatttatattcttcttttccttcttgttacgggctgttgtcgcgcaaaccggcgacaccggatatacttttcttcgctatccttcttcggcaagagccaatgcgatgggaggcaatacgatgtctctggtcgaaagggatccttccctgatttttcataacccggctttattgggagccgagatggaccagatggttaatctgaattacctgaactatatatcggatatcaatgtcgggagcgctctttttaccaaggcgtataaagaaaaaggagcttggggtgtgggagcctcgttcttcagtcagggaaagatacggggaatgtcggaagaaggtcttccgacgggagattttacggcaaaggacatcagtgtgaacggtttcttctcgtatgacctttccgagcgctggcgtggcggggcttcgttgaagtttttatattcgggtatcggcgattatacttcgatcggcatggtggtcgatgccggtttgagttattatgattctgaaaaaggattttctttcggttttgcttttaaaaatatcggagcccaattgaaagcctatgaagatgagcgccagaagatgccctgggatatccagttggggatcaccaaacagatggcccatgcgccgatccgtttgtcgctgactgcacagtatctgacgaaatggaaggttgagtatgtagacgattacgatagggagtatacaggagataattttttcaagtcttttgtgaagcatctggtgatcggtgttgattatatcccttccgacaacttctggctcggtatcgggtataaccccaagacggcgttggacatgaaattgcagggaagtaacgctcttgccggtttttccggtggtgccggtgtgcggatcaagatgttcgacgtcggtgtttccgtagccaaataccatccttcagctctttccatgatgctgagcatctccactacgatcagcgatttctaagtaaattcggtttttcgttctcctttacgataggaccttttgccaatggattactggtccgttggcttctttgtcgtatctcatagatcgtccgcttggttgcgaacggtttccggattatatggaaaacaataaaatataaggatgaataggataatttataaggaagggagcgataaactgttgtatatttgcatttcctttacattaatagtagtgatgaaaaagataattatagcgatagacggtgtctcttctaccgggaagagcacgatggcaaaagatttggcaagggagctgggatatacctatatcgatacaggggcgatgtaccgggctgtcactttgtacagtttgcagcacggtttctttacaagcggcggtatcgatgaacagaagttgcaggatgccatgaacgatatcgatatctctttccgctttaacccggaaaccggacgtccggatacctatctgaacggcgtgaaagtggagaaagaaatacgggggatggaagtggccaaccgcgtgagtccgattgctgctttaggttttgtacgccgtgcgatggtcgccaagcaacaggaaatggggaagacgaaagggatcgtgatggatggtcgcgatatcggtacggttgtctttccggatgcggaactgaagatttatgtgacagccagcccggaagtgcgtgcccaacggcgtttggacgaactgaaagccaaaggcgaggttgcttcttttgaggaagtccttgaaaatgtgaagacgcgtgaccatatcgatatgactcgtgtagagagtccgcttcgtaaagctgatgatgcgctggagctggataactcgcatttgacgattgccgagcagaaggcttggctcttggaacagtatgaaaaggtcgttacatcagactagccatgatagaagtcgagatagataagggttccggcttttgttttggcgtggtaacggctatcgagagtgcagaacgcgaactgaaaaatacgaatacgttgtattgcctcggagatatcgtacacaatagcttggaagtggaacggttggaaaagttgggactgcggacgatcgggcacgacgagtttacccgtttgaagggagaaaaggtgttgcttcgggcgcatggggaaccgccttcgacctacgagatcgcccggcggaacaacatcacgatcgtggatgcgacctgtccggtggtgctccagttacaacgtaagatccataaatgctacgtggctacgcgcgatagtcatacgcaggtcgtgatctatggaaagaaagggcatgccgaagtaaatggtctggtcgggcaaacggaagggacggccatcgttatcgagaaggtacaggaccttggccggttggattttagccggaatatctgcctcttctcgcaaacgaccaagtcgcttgacgggtttcgtgaagtcgtggctgaggtccggcggcgtattgcagatggggtacaattcgagtatttcgatacgatctgccgccaggtggccaaccgtttaccgaacatcaaggcgtttgcttccaagcatgattgggtgtatttcgttgccggaaagaagagttcaaatggcaagatgctgctggaggaatgtcggaaggcaaacccgaacacggtctttatctcggaggtaaaggagattaccgagccgttgcctgaagatgtggggagtgtcggggtgtgcggggccacatccactccgaagtggctgatggaagaggtggctgtgcgtattcgtgaattgaatgccagccgttgacttttaggggtaagatttgatgaagttttggaaaatagacaggtttttggcaaataattattacttttgccgcgaacatataaaatataagacgctatgtctacagttaagtgtattggcattttaacgtccggaggtgatgctcccggaatgaacgctgccattcgcgcagtgacacgttccgctatttataacggaatgtccgttaagggtatctatcgtggatacaagggtttgataaccgacgaaattgaagatttcaagactcagaatgtaagtaatattattcagcgtggcggtactatcctgaagacggcccgttgtgcggaattcaagacgccggaaggtcgtaagcaggcttacgacaaactgatggagcatggcatcgatgctttggtcgccattggtggtgacggaacgctgacgggggctcgcatctttgcacaggagttcaattatccgattgtcggcctgcctggtacgattgataatgacctgtatggcacggatatcacgatcggctacgacacggctttgaatacgatcatggaatgtgtcgataaaatccgtgacacggcaacctcccacgaccgtctgttctttatcgaagtgatggggcgtgatgccggattcctggctcttaacggagcgattgcatcgggagccgaagcggctatcattccggagatatcgatggagaaagaccaactggccgagatgatcgaaactggtttccgtaagtccaagaacagcagtatcgtccttgttgcggaaagtgaggtgaccggtggtgcgatgggcgtggctgaacgtgtaaagaaggaatatccgcagtttgacgtacgtgtttcaattttgggacacttgcagcgcggtggttcaccgactgcacaagatcgtatcttggcaacccggatgggagtggctgccgtcgacgcgttgttggatgaccagcgtaacgtgatgatgggtatccagaatgatgagattgtttacgttcctttctccaaagcgatcaagaacgacaaaccgatcaatcgtgatttgttgaatacgcttcgtatttcttctatttgatctgttattggcaagtatatgaaaagccccgcggatattttttatccgcggggctttttgcatatagagttcagctcttgtttactcgttgcatttgaaagcatagacattgcctccgaaatcggttgcgaagatcatgttgccgtttgttgacagggtggagaatagcggagctcccgttttatgtttccatgtcgtttgcccgctttccttatctatgccatagatgatgccgtcggatgctccgaagtaaatcgtatctccgatgagtagggggctcgtttcgaccgtggcagccggatggcgggaatagggagccgtataaaccagagctggagatgtccgggctttccatctgacctcgaatgtctcacggtcgagtgcgaccaagccatcagtctgcgtcccgaaaacaatcagtttatccgtgaccaacggggtcgaattgacttggacattgaatggtaactctttacggacaatgacttcccccgaatggcagtcgatgataaataaagattggcgcgaagtaacataaagcagattaccgtcatatgtcggtgttgcgcctctatccgtaattccgtctttatcgagtttccaaagcaactctcccgtttgtgcgtcgttgccgtagaagcctcgccagttggcgcctgaaataactactccgtttgccagcagaggagtcgatgtcgtggcttctccttgcggccagcctttgttcagccagactgcgtcacccgttttaccgttgtatgctccgaatgcctttccacttccggcatagacaatgccattggcggctgtcagcccgtccacaaggacaggaaggccggcgacatccatctttttgtcccattttagtttgccagtctgtgagtcgatggcgtataaataaccttccgcatcttgtgcgaagacggttccttcgtctacggcaatcgtgtttttgatggagttgcgaaccggatatctccattgtaattcaccagtctttgcatccagagcgaagattgcaccttctcccttcaaatcttcatcgagagaagcgacgtacactttaccgccggcaacgaccggagaagagaaatacaggttggcatttacgttacgggtccatgccagtcggggtgttttgccgatctcttccggctggtatacgaatgaggaacggctgattgctgtttccccattgttgaacaatgctttggctgtaatgaaaatccgtttgcctttacagtctgccgggagtttggccattccggaccaattccagtctgtattttgagtaagctgtgtttccggtaggacagtattgccgtctacgacgcaactgtaagtgacacgtatggcaggagcaactgcattgtaggtgttgaccgataccggaatcttttcgtctgacgtcattgtacatgcatcattcgcgatagaggcggtttcgatggacttgtttatataggtatagcggagcatagtctggacatctcctttttgatccacgtctaccacacggaaggcggaagtcgagtggtcgattccccctttgtcgagtgttgcggtcgagattgtcaggacatctccttgtttccgcacgaaatgattatgccaatggccgtacagccacgctttcaggttatgttcgttcaggttaatcttctcgttatcgtcaataccgaaaacaaactcgttcccggaagtcagcaggtcatggttaaagacgatgatcggttttcctgtcggtacttgcgccaggtcattctttaaccagcggtatacatcttcttttgtatagccgggctgatgatctcctcctgccattggtgtaacgacgtagtggacatttccgaagtcgaaggaataataaaccggaccgtaaacattttcaaaaacctcttctccatatttcccttttacaaggtcatggttaccgatacagtagaacatcgggcagtccatgtttgacgtgttcatcagatggatatggttcttcaatccattttcatagcagatatcaccggtatggatgataaatgagatattctcgttagccgcataatcccggatgttattcgcccagtcttcttggttttccgtattgaatatctcggtatcggaaatatggatgaacctgtgactgccattcggcttgatgcgtcctttccagggttgcaggccgaaatcgtatgtttgccctgtgccgttgatccgccggtaatattgattgtctgtcctatagccggaaggagtggtgatgaagataaatcgttctcgtttgtgtccgggaagtgtatatactccttcggcattcgttttgacaacgttcaacccgtcggaaacccggatgccttttaagactttctctcctttgtcgtagattccgttccggttggagtctacatatacgtggccttgataggcagcatgagcctccgtgattaccgcgcaacttagtaatagcagtataagttttttcttttccatttatttatttctttgcagacagattttccaagaacaggtccatcatccgtttggctgcaacgaacgaactgatctcgttattcaatacctgctgctccgtgaagttcaacattttttctaccgccggattgtggtagaacgtttcgcggagtgtgtcgttgatactttcgtacatccaatatttggcttgttcgttgcgcttgtagttgaagtagccgttcttttgagtgaattccatatattctccgaccatatcccagatttctttaatccccagattgtaataaccggaataagtcaatactttcgggctccaaccggattcgggggccggaaacaggtgcaaggcgttgcggaattgtgccgctgccagttttgctttttcgaggttgtcaccatccgccttattgatgatgatcccgtccgccatctccatgatcccgcgcttgatgccttgcaattcgtctccagtaccggcaagttggatcaacaggaagaaatcgaccatcgagtggacagccgtctcgctttgtccgacaccgaccgtttcgacaaatatcgtatcgaatccggcagcttcgcaaagaacgatcgtttcacgtgttttacgggcaacgccacctaaggaacctgctgatggcgaaggacggatgaaagcgttcttttcacgggacaaggcctccatacgagttttgtcgccgaggatgctgcctttcgagcgttcgctgctggggtcgattgccagcacagccagtttacgtccttgccttatcaagtgcatgccgaacgcatcgatcgaggtgctcttacctgctcccggtactccggtgatgccgatacggacagactttcctgcatgcggcaggcatttttcgataatttcctgtgccacttgctggtgttcgtatttagagctttccaccagtgttaccgcctggctgaggatcgtaatgtttcctttcaggataccttctacaaattcggcaggcgtatattctttgcgttgaatcctttttttcagataaggatttacggtcggtacatcggctactcccttgttcacctttaatcctttgtacagatcgtcgttttcgggatgttccataatttagttgaaagttgaaaggtgaaggttgaaaggtggaagaggaagctgttttaactttcacctttcaactttcacctggttatttattggctgtcaccttcacaagccgtaccggaccgttcgggtcgttgcatacgaaattgatgagggcttccagttttgtttttatctctttcgggcgtactgtcactttgaaagtggctgtcgtgcccggctttatttctcttttgccaccggaaacagctacgcgttcgtcttcgcaggtcacactatagatgacaagcggtgattttcctgagttggtaatttcgatcgtgccgctcacccgaccgccgaccagtgggatgaaactgcttttgtcaggtagtttgccgaagtcgagcaaggtacccgatagctgggctaccggagctttcgccttctccgaggcagtcagtttgctgaagtcgtctatgatattggctgcaacatgtagtttgccttctgttcctttcttctgaccgatactttcgaccgttaccggaatttcggctgtcatgcggcctttccgttttgcctctttcgcattcatgaggatggatatttcgcctgtttcacccggagccagttttgtaggattggctacgacgttcagataatgaggcgtctttcctaaatggatgttcagggatgtttttccttcattgatcaggttgatcttttctcccaatgtttcttcggggcggatcgtgctgtaaagaatattttttgtttgcagtttcaggtcgccgatgctatacggataaatcagtatgggttgagcttctttaggggttacgtttcctttgatacctaaggagaaactgccttttttcccgttactgtagatcgctatagttttgtaaaaagggccgggacgtcctttcgggttgtaggttacttttacttctccggtctttcccggagcgatgggctctttggtccattcgggctgcgtacagccgcaggatgctgtgatcctcgtgatgacaagcggaccgttacctgtgtttttgatcgtaaatatgtgacttgccaatccatcggattctccaatcgtaccgaagttatagatcagctcatctgcactgattcgggcgttattttgtgccgatatactgcttattgcaaacagtataccggcaagaataaagactagtttgtttctgttcaacattctttatcgttcagttttcctgttattattctacttctccccggatcgtcaggataaaactaccggttttaccattactgtatacggaaatagtcttgacaaaaggaccggggcggtctttcggattataagtgattttgatatcacctgttttacccggagctatcggttcctttgtccattccggtgtcgtacagccacaagaggcgatgacacgtgtcaagaccaacggtgcttcgcctgagttctttattttaaaagtgtgcgacacattgccgttcgcttccttgatcgttccgaaatcgaaagaggtttcatctgccgagattacagctttgttttgagctgaagctattcctgttgccagcaggattgccataaaaataaaaataatctgtttcatcttctctttttatttagctattgtttaaaatgcaaagataatgtttactactgaattagtttctttaaaaaataaaattctgcttccatcgcgagtcggggataccggatttgtgtgcacttgccatcgctgggagtctcactcaatctaccttgacgatgtttccttccgtatgcgatacgaattccggcgcatagagacattggatcgtactgattcctcctgcatattcaccggtacgtgacacgtatacggcatattccagtacaaaagtcccctggggcaggcgttcgaagaagaaattttccgaaacatccatcggcgactggtaataccagaccccgtccctatagatagaaccggaaagttggtctgccggttcaaaacatccggctcggaggtctttcaggaagacgtaatccatttcgcgatcggtgcggaccacaaggcggacgaccactttgtcgccgacactgagcggttcatccggggtgaccggacgaagttgccgctcagtcccgttattggtttctacgaatagcagcttttctacgttcaggacgcctttctgtttttttacctcgttgatgttctggaagtattgctcgtagacagctccccatgcaggcgccgagccttctttccggatagagatggaggttccttcggatgaggtcgctttttcatccgatatggttactttcagatagccggtggccaattcgccgcttgtcgtgctataggtttgcttgccccattgggcggtgcaagtgttggcagtgtccaaccagttgctgcctgtcagaagcaaagtataaatagcgttgaccgttgccggtacggatttccagttctgcgtctgtttctggttgagtaaccattgtttcatacgatctgtttcttgtttgtcgggcgaaacttcattgaagaaagccatcagcaggcaatgggtgtcgatcggagaggcaaaggcgtttgctctgctccggttgttcgcccaatacatacctttgtccggagaggtcgaagctgttttacgcagccaagtgataatctttccggcaatctctttatttccattcctccacatgagccaccctatttctcctttgccgtggatggattgtttgtcccactgcttttccgccaggttcgtatagtagcggattgcttcacgggccgaacccaactccggaatgtctcggtaattgctgcggacaaacagatattcgatttccaatggagaaatttcgtttttctgccagttcttgatcttttgtaatgcctcataatcggactggatttgtttgtcaacgaatttgagtgctttcatctgcatctctttttcctgctggttatattcgactgcattcaactccgtcagttggctcatccctttcagaatatagagtgtgatctcctggctcggatacatgcctttgaaccaaccccaacctccatccggcgtttgcaggtcgagaagatgtcggagggcggtttcccgctgtcctgctgcccggttcatatcgaaaaggagggacaaacgctgtttttgttccgtttcattgtctgcttccaatacccagggtgtttcctgtagaaggatgtttttcagttctgcattcttttccaggttggaatagagcgtagaggcatttccgccctgtgctttccactggctgatgacctgctggatacgcgggtggacggtggcgatgtagtttgctaacgtattgctgtaataggaggcgaaccaggaaatgacgttgtcgttttccggttgggatagggtcggcaatgcctgtacggcgtaccagatcgggttggcggtcagctccagtgtcgtgcggaacggccggatacctttgctgtctttcaggcggatcacttcttcgcttttgtcgaacaggtagaacggggtactttccgttaccaatatctcattcgaaagaaccggaatcaaatgttgttcgccgtcactccctttatccgaatcggccacgatacggcaaccgatgacgccgcccgctgctgccggaaccttgaacgaccagcttacggtcgtggtgctgtcggccggcagtgtgaacggtttctgcgatttggtgaggcagatcaccggctggccgttgtccggatcgaacaattccaggctggcgcgtccgtccatagtggcagacgactggttgctgatttgcgccgtgatggtcacttcatcgccctggcgcaggaagcgcggaaggttaggggttaccatcaacggtttgctggtgatgatttcgcgggacaggtagccgtatttcaggtcttccgtctgggccagcagttgcagtttccaagtcgtgttgctttcgggcatcgtgaagctgaacgctacatcgcctgcctcgtcggtcactaaggccggatagaagaatgcggtttcggcaaagttttcacgaagttcgaccggtttgttcgggaagaacggtgttccattttcttccacttcttcttctgctatgatattagcgacaccctggtacgcttttactgccggttcttctagtggcatactgtcttcggtgatgttgagaacttcggttattgccggtgctgtccctgatttcatgacggctccggttgcatagcgtcgttcgctttgttcatattgccaaccgattctcagtacgtcctgccagtcgagtcggtcgtattggaactgtgggacgttcaatcttttccgatctcctgtttcgtacctgctgctgtttgtgaatgctgtcccttcagaaaaacgaggagcatacagataaacatatcttttaggagagaaagaccagctgaaaggcaataacttgtccaatgaagcatcgtacatgccagccaaaacttcagcggagacggtcaaggaatcagcatccgtaatacggaatttccaattttccttgcttcccggcagcaggtggtcacggaatgtctttgcctggatattcaatctccgatccggttgccggcgttgaaccggaatttgtttcacatacatcttgccgtctttgacaaatgtgaaagacacggtgaaaccttccccatccgtttctttgaacgggatgcggaatgtccggttttcatcgctcaaccggatcagtttgcgttccgtgcatttattgtctgctgtataaatttcatataatatatgtgtgtctttgtcggatgttccgaaaataaatgcggcctcttctcccggcgcacaggtcgtgtgctcattaaccagccaggtatgcataaatacgggcggccgtttatcccggcggttgtacaagatgaaatcttgattggcggaaacttcttttccgttggagtcggtcgattttacttccaggcgatagcgtccggcgggaagttcgcggaatacgacaggtgatatttcgtctcccgttatgaaagttccaacagtcaccagtttattgattttgtaccggtctgcaccgaacatatccttttctggtttttcgtccgacagagaataaatcgtgtaacttccttctgcagatgttttctgcctgttcacggtataggccgttaccacagccttggcggaatcattttccatttcctctccgggcatttggatatccaacaggatacctgtatcgccgacggagaaggtatagcttgcctcttgtgtctctcctttgctgtcggtcagggttgccgttacttcgtagctctggaaggcagggcgcatatctgatgtttccggccattcgggtatgaaggagatcgtgaagtttcctttattgtcaatttttgccgttccgttagccacctgcttgtatgtaaaatcgaacgggtccggcatataaaaacgtgcccagaacgggcgacgggtgatcgtccagtttatttcgccttcctgcaagtttataccggagaaagtttgtgcttcacctgtcagtttcaccggatggccgaaagacacctcttccttgagcggcaggaaactgactttgaaagtcgggcgtttgtattcttctacccggatatttgtacgagacctttctgtgacaagcgtgaagttcccgctcaaagtctgtgccgggatggtgaactctccgttgaaggaaccgaaccggtcggtcttgaattctttgctggctacatccttgtagttggcatcccgcagggtgacggtataggtgcgtccggccacgacatgcgggttgtccgtatctttcacataagcgatccctttgaagaatacgttttgccccggccggtagatgccccggtccgtaaagagtgacaaaccgactgtctccttttcctgtccggagcgggaagtgccgtaaggatatatatttgtgatgatggaagaggagtcttcgcggagcaccggacgtatgtgctcgatcttctttttggccgggaggatggcgattcccaaccggtctgttttgacttctccctggcgttggatggttccgttcatcatattggttttgtaatagataacggttgccccttcgatcggtttaccgctttcgaggtcggtgacaagcacttccgggttgttggtctggctacgggtgagggctgccaggcggctgacgctaaaacggttggagactgtcagctgcttgccgggaaccgtgatcacatattcgtataatcccaacctgtccatcggaatggccagcgtggaatcggcttcggtgtatgagttggcgagattcatcttgaatgtgacctcttttaccagttctccccgcatgcttttactgttcttgccgtaattccgccaggcatcttccggctggcgaaggcttttgtagatgcgcacaactaaccggggtgtgttgacatacttgatttgcaatgtaaggtccttgcccggatacacattgttgtcggattggatattcaggaccggcatttccatttcgtttaactggttcttgaaaacgtttatgcggtcgtatttgggatattgcgcgatactttctttgcagagcgaataaatgagcgcctggacggagtcttggtgagccttgttgccttgataacgttcccgttggagaagattcatctcggcaatgcgtatttcggcggcaaacggctctttgccgtatacattatacaaactgtccaacgtgtttctgtagtcgttggtgtttgtagactggctgtcgtatttatattgccagtagtccagttcgtccagtaataaggcttttttctccggttgtgtacggcggaagtcgatcacatcttcataccatttatccgacggctgtatgtcgatcgcccgaaaagccaggaaatcatatagagtagggcgaagttgaggcgcgtctttcccttttttcaggatcaggttatattggctgatcggtgtttgttgcagcaaccgagccggttggagagagagcgtcagttcctgtttgatcttttctctgaacagattggaggtccattcccggatatcatcgggaacatagcctgccagttcggtccgctggttgacgttccaacggttttgcatataatagttgttatacatctccgcgatcatggagtggagtatggctacagatgcggagtcgggacatgtaccggcataagtttccacctctttgatcagttcggggaatgtattgacgtctttttccagctgatttttcatccgggtgataagcgcctggatcaatgccggagtgtttttcgtttggatggcttctatgatagccttttcattggtggatacctgatttgctttcacgtagaagatcgtggatactattccgcatacgatcagggctaaaacaataattgctcttatcttcatatctttcagatttatgatttcggatttatgaagtatgactgataaatcataaatccgaacccgtttcttatatatagatacaaagaaagagcaaaaagttgtaaaattaccgttaattaggagtaattttattttttacggacgtaggtcaggaatgtgtaaggatacggatttttctcgtcagcgggaaattcctgtcgttccacctcttcccacagatcccagttgacaaccgggaaaaatgcgtctgcatccggaaactccccgtgaatacgggtcagatacatcttgtcggcaatccctaatccttgtctgtaaaccagagaacctccgatgatgaagatgttttcttccttttcgcagatatccagtgcgtcatgcatggattcgcaggcaaagcaattgatgaaacctgcttcaggcatcgtcgtcagcacgacatttttacggttgggcaatccgccttttggcaaagattcgaaagttttacgccccattattacggcgtgtcctgttgtcaggtctttaaaacgcttcatgtctgccggcatgtgccagagcagacccagattcttcccgatcgcattgttgtcggaaatcgctgctacaattgaaatagtactcattgccatttatgatttatgatttataatttatgatttatgatttcaagtttatggtttatgaggtctgactatatgcagttcataaatcataaatctgaaatcataaatctcttatacggccacttctcccttgatatgaggatgagggtcgtatcccgttaggttgaaatcctcgtactggaaaccgaatatatcttttacatccgggttgatttccatccggggaagaggccgtggatcgcgtgtcagttgcaactttacctgttcaagatggttcgtatagatatgtgcgtcaccaagcgtatggacaaaatctcctgctttcagtcctgttacttgggccatcatctgtaataacagggcatacgaggcaatattaaaaggtacgcctaagaaaatatcggcactgcgctggtacatttgcaggctcaggcggccgtttgccacataaaactggaaaaaagcgtggcagggaggcagattcatattgtccaggtctgctacattccaggcgctgacgatgatacggcgtgaatccggattatgcttgattgtctctaccgcttcactgatctgatcgatattgccgcctttatagtccggccatgagcgccattggaagccgtagatatgtcctaagtttccatccggatctgcccactcgttccagatcctcactccatgttcctgcaggtattttgcatttgtatcgccctgaagaaaccaaagtaattcgtatataatggatttcaaatgcagtttctttgttgtgagcagaggaaaaccgtcttcaaggttgaagcgcatctgatgtccgaatacactgtatgtaccggttcctgtccgatcttctttcttgactccttcacggaggacacgatcgagtaattctaaatactgtttcatttttctctattatgacagacaaatgtacgaaagtgatttgtattaagcaacattattctacagcatcgtttgtttttgataataatagcgtatatttgttgcctatctaacaaacattaatttattagtatcgaaaatgaagagactatgtatggctgtcatggcaatgtgtgttttgttgtcatgcactgagaaaaaagaggaagccactctttctggactgatgaaatctaatttcgtatcagaagtacagggaaaaccgactgcattatatgtgttgaagaaccagaatggtgcagaggcctgtgtgacaaactggggtgggcgcctggtatcggttatggttcctgacaagaatggcaaaatgacggatgtcgtcctgggatacgataatatccaacagtatgtggacaatccaaacaataactacggcgggttgatcggtcgttatggaaaccgtattgcaaatggcaagtttacgctggatggtgttgagtaccagcttccgcagaataacaacggacattgcctgcatggtggtccggaaggttaccatacggttgtttgggatgccaaacaggtaaatgaccaaagtgtggaattgacgtatctctccaaagatggtgaagccggtttccccggaaatctgaacctgaaagtcacatacacattgacgaatgacaatgccgtcgatatcaaatacgaagctacaacggacaaaccgactgtcgtgaacctgacgaaccatagctatttcaacctttccggtgttccgggttctcagatcttggatcattctattatgattgctgcagatacttatgttccggttgatgaaacattgatcccgaccggcacgcttgatccggtagaaggaactccgatggatttgcgtacggctgttgccgtaggcgcacatatcgatgatccgttcgatcagttggtaagaggcaaaggctatgatcataactgggtgttgaataataattgcgacatcaatgtgttggctgcaaaggctgtttctgcaaagagcggtatcggccttgaagtgtacacaaacgagccgggtatccagttctatgccggaaacgcaatgacgaaggatggagataaaggaaagttaggtgtgatttatccgcatcgcggtgctttgtgtctcgaaacacaacattatcccgattctcccaaccagccgagcttcccaagtgtggtgctgcgtccgggcgaaaagtatttcagcgagtgtatttataaattcacggttgaaaagtaggatacgtattatttttagggaaactttccggtaatcggaatgcttggaggggcggctgtaaaaggccgccctttttttgtttccaaaaatctttgatttatatctgttaatgtttcttcgtaaacaatatggtttgccgtttttcactatctttgcgattgacataggattgtcgaagctttgacttttcggctgttctgtcgatggataacgttaagcgtttaagatattatctttggaactgaaaatcgccaactttccagtcggacaaagataatagacaactggacgctcacgcttgttatatatacttgtgtatatagaataaagcgtgggctgttgtttattatttgtccgatgggtgtttggcgatacctcagtttcaaaatagtagattaacagttcccacgctttttaattaatatagatgccaaacataggggagcagggcggcaccataatttgagtatgagctcagaagaatcggaaagaattgcaatctgttgcgtattattggatattgtggaagctatgggcacaagtgccgacataaagggctgccgacattatcaatcgttgagagataaaacggatattaccgattctgactttgaaggggcacgctccgtttcggtattgtccagtttggttactttgaaggggatgcattataataaaaagatgctgcttgcattgactgtatgtgatctttattccggacacacccctgtttctcttaatttaaggattgcattcgaaacattgatgaatgcaatcgaatggccgatatcgttttctgagatattgacgatcagccggacggaataactctattcatgtttggatgatacatatagtcttttcttgtcggataagtatcttaattacaattagtcagtatgaaaagactctgtgcatccgggtgtagccgtcccgaacatccggatgtagagagtggcaacatccgggtgtagaaagccggaagatgggggtgtttctgaacatttctgcttgctttccgctcttttcctgcttgttttctgcaaaaaagtatcttatgttgacgaaataaccttcttacaaatgtatattgacatgtttccttccgtgtttgaaacaataccggctatctgtttcaatgtcagggagagtgatacaagtgtgacataggagtgatacatggatcaggcatgtatcactcttgctcttattgtttatcaatgcttacgaagcaaaatgtgatagagtgatagagaatcttggaaaaacgataaaaaggaatcggccgtttttagtcgtattcaacatattgcggtcggaatcaacagcaatcatataaaggggatggggaaatgtccggatacaaaaaaggctgatgaatctgattcaccagcctttttgtatatccaatataatagttaaaacatccctttttccaaatcagcagcttttacgcggaagatgtatccgttgcgcgagaagactaattcaccgtcttctttctttttctggtttactaatcgctggaatgcgatattggcacctttaactatattctcttcaaattctctaacttcttgttcactcatgatgctcaagttttgtataaatatccgaattatatatctcttttttatcactcctgaaacctttggcgattacttccatcggtgacatggagttgtctgcaatcatccaataatcacaaatggggatatatagttcaaagagattgtgaatacctgcctcgtaacgacggcggatagtactctccggaatgttatgtcctccggcggccactctcatttttactcgctccactgccagatccggtgtgttcagccagaaatataacaatgtcacataatacccttccctttgtgcttcccgaatcaggtttgcgcctgaacgggtggccagtgtagtttccatagcaaacgtttcgcctgaagcgattagttctttaatgcgtttatacataatacgactggcttcaacggctaccgcgatactatcagaattaaaaggggaaagccccttggcaatctcgtcggaatttacgaactctttacacttcaacatctctggaagaattgtgaaggaagctgtcgtttttcctgctccgttgcatcccgatattatgtatagatatggcactacttactgtcttttgttggggcaaatatagataatagtttaatatgttggttaattttattctcaaaaatagtaaaaatgtgcagaaaatgtacggataacccctcagttcgttgtaaaaacaggcggtttggtgtaatttaatggctttgtcaaatgtctgcagcatacctttatacccataaaaggtcgctcattataccgtctgagatgaaaatgccttttttcgagagggttaaagtgtcgttttcacggataagcaacccttgacgcaaataggtagctgcctgctgttcgagataggtttgcttttcttctccgaaccgctcccggatatcagctgtccggattccccacattgtgcgtagtccggtgatgatgaagtcgttgtattttgtgttgatgtccaattcttctatctctatatcgggaatgcctgccttgatcccttgtaagtagcggggaagggaagatatgttccattgccggctttctccattataggaatgggcggaaggtccgatgcctatatatttcgtgccggtccaataggaactgttgtgccgggaaaaataaccgggacggccaaaattggaaatctcgtaatggagatatccggcttcggtcagccgattgattaaggtggagaaaagggtgacgctcaagtcttcttctataggagtcactttcccggcttccatcaatttatatagggctgtcccttcttcatatattaagtggtaggctgatatatggggaatttccagacggatcgcgtcatccagattctctagccactcttccaaggtctgtccgggcaacccgtatatcaagtcgatgcttatgttttggatgccgttttctttgcaaagcccgactgcgcgcaaagcctgttcgcggtcatggcgccggttcaggaaacggaggtctttttctttgaaactttgtactcccatactgatccggttgaagggcaggttgcggagagaggcaacgtattccggtgtcatatcgtcaggattggcttccagcgtaatttctgtgcatgagtttgtgccgaacaagcggtccgcagcctcgaatatccgttcgaagtcggcctgttgaagttgggagggcgtaccgcctccgaaataaatggtgtcaagaggttcccctcctatatattcctgacgtaattccatctcccggatagctgcatcgatatacggctctttgaacttcatatccgtattggaaaagaagtcgcaatacaggcaccgtttggcgcaaaaaggaatatggatatataaacctgccacttagttctgctttttaacgatacaaagatagcaacattttatctctatctgtctttctttccgctctttatctttgaactgttaaacaacatagttctcaaacactggatttgaaattgtttttctcctttacaatctctaatttgcggtcccgtgaatgaaaagggttttcggggcaatctttattgttaaacacaaattaataccttgatatcatgaaagtataccaaacaaacgaaattaagaacatctctatcttgggaagttcgggctctgggaaaaccactctcgctgaagcgatgctttacgagggtggagttataaaacgtcgcggaagtgtggagtctggaaacactgtgagcgattatttcccggttgagaaggagtatggttactcggtattctcgaccgttttcagtgtagaatggcaggacagaaagttgaatttcattgattgtccgggttcagacgattttatcggcggtgcagtttccgctctgaacgtgacagacacggcactgatggtactgaatgcccagtacggcgtggaagtcggtacaatcaaccagttccggtatacagaacaatttcataagccggttatctttgttgtgaaccaactggataacgataaagctgattatgatgggacaatcgcccagctgcgtgaacaatggggaggtaaggttgttcctattcagtatccggtttctacgggttcgtctttcaatgcggttgtcgatgtgttgaaaatgaagatgtatcgttggaaacctgaaggtggtgttcccgaagtgttggaaattccggcggaagaaatggataaggcgatggaacttcacaaggcattggtcgaatcggctgccgaacatgacgatatgttgatggaaaaattctttgaagaaggtacattgagtgaagacgatatgcgtgccggtattcgcgccggtctcgttatccgggggatgttcccggtattctgcgtatgcgcgggccgtgacatgtgcgttcgtcgtacgcttgaattcttaggtaatgtcgttccttgtacggataagatgcctcgcccggttacgacagagggtgtggaagtgactcccgactccaacggaccgaccagtttgttcttcttcaagacgactgtagagccgcatatcggtcaggtttcttattttaaggtgatatcaggtaaggtaaaagaaggtgacgatttgttgaatgccgatcgtggttcgaaggagcgtatcgcgcagttgttctctgttgccggacaaacccgtaacgccgtgaccgaaatggttgctggagatatcggtgctaccgttaagctgaaggatgttcgtcgtggtaacacattgaatggtaagggatgcgattatcgtttcgactttatcaaatatccggacccgaaatatcgtcgtgccgtgaagccggttaatgaagcagatgctgaaaagatgatggaaatcttgatgcgtatgcgtgaagaggatccgacgtggataatcgaacagtccaaggaattgaagcagacgatcgtttccggccagggagaattccatcttcgtacgttgaaatggagaatcgagaacaatgataaattgccgatcgaattctacgaaccgaagatcccgtatcgtgaaacgatcacgaaagcagcccgtgcggactaccgccataaaaaacagtcaggtggtgcggggcagttcggtgaagttcatctgatcgtcgaaccgtactacgaaggtatgccggcaccggatacatatcgttttggcggacaagagtataaaatcagcgtacgtgatacgcagactatagatttggactggggtggaaagctggtgtttgttaacagtatcgttggtggagccatcgatgcccgtttcctgccggctatcttgaaaggtattatggctcgtatggagcagggaccgttgaccgggtcgtatgcccgtgacgtgcgcatcatcgtctatgatggaaagatgcacccggtagacagtaatgaaatttctttcatgctggcaggccgtaatgctttcagtaccgcttttaaagaagccggtcctaagattctggaacctgtttatgatgtagaagtatcggttccggctgattatctgggcgacgtgatgagtgacctgcagggacgtcgcgccatcattatgggtatgaatagtgaaaaaggctacgaaaagctattggcaaaagtgcctttgaaagagatgtcttcgtactcgacatctttgagttccatcacaggtggacgtgcttcatttaccatgaagttctccagctatgaattggttccgtcggatgtccaggacaagctgttaaaagcttacgaggcaactcaggcagaagattgatttggattttctataaattgtatgaaggctgcccctgtgaaggagtggccttcattgttttttcatatggctgttgcaatgccgtaatatgaagtacgtttttttgtatcgtgttaatagaaacaacatgaaactaagaaagtattatccaaccattgtcctgtcggacattcacctgtttggtacggggatatccattatctgaattccggtgattgggtggaaagccttacggcttttgtcgaaaatgaacaaggtgaatagaatattgttttttataataaggagggatacacagcggatgaaatgcaaccttcctgtttacactatgccgaagtgatatgaaaatattgtttatcatacagggtgaaggccggggacatctgactcaggcactttctctccgtcagaagctgacggacgaaggccatcaggtggttggtgtcctggttggcaaaagtcctgcccgccgtcttccagatttctttagcaagaagatcgaagcgcctgtctatccgtttgaaagtcccaacttcctgccttccgcccaaaataaacaggtcaacctggtcaaaagcgtagcttataatgttttccggttgcacaaatatatgtcgagtatccggtatatcaaccggatgataaaggagacaggagcagatgtggtcataaacttttatgagctgttgaccggacttacttacctgttttgccggccgaaagctgtcatggtctgcattgcgcaccagtacttattcctgcatccggactttacttttccgaaagaaaatcgtctgtcgcttgcttccttgaagttctttacccgcattacggctatcggagctgctaagaagttggcgttatctttccgtaagatgcgggaggttccggccgacgggatcgtggtggttcctcctcttttgcgtaaggaggttttagaaatgacaccgacaaaaggggattatctgcatggctatttattgaatagtggatttggtgaagagatatgttcctggcataaggtacatccgagtgtcgaactgcatatcttttgggataaaaaagaggtgcttcctgaagttaaagttgattcccgtctttctttccatcaattgaatgatacactgtttgtccgttatatggcaggagcgagggcgtatgccacgactgctgggttcgagtctgtttgtgaagcgatgtatttgggtaagcctgttctgatggttccgacacatattgaacaagcttgtaatgcttttgatgccgttcatgccggggccggcgttattgcggatcggttcgatctggatgctttgttgcaactgtcgcaaacgcatcagccggatcttgctttttctcattgggtgaagcaggcggattggttaatcctgcgtgagttccgcccggacttattgatggaggaaacacctgcttccctatggcatcgcttgtctactcgttggatataccggtttggaaaattgttatcgatttgatggcggtttattgattcatgatttgacagatttgaaacatgaaaaaagatctatcggtgggcaaacagacaaggctgcgcattgtctgttaattcaccgatagatcatcattttaaggttcaaatattcttatatactatttcaacgcctgctcgatatccgcaatgatgtcatttgcattttcgatgccgacagacaggcggatcaggtcgggagctacgcctgcttcgatcagctgttcgtccgtcaactggcggtgcgtatggctggcggggtggaggacgcaggtacgggcgtccgctacgtgggtcacgatgcagatcatcttcaggttatccataaagcggatcgcatcttcgcgggaacctttcaggccgaaagcgatcacgccacaagtcccgttcggcatgtatttttgtgccagatcgtaatatttgttgctctttaatccggggaagttcacccaagcgacctgctcgtttgcttcgagccattcggcaacctgctgggcgttcttgcaatgttgaggcatacgcaggtgcaaggtttcgagtcctaaattcaagaggaaggcgttcatcggagcctggatggaacctaagtcacgcatcaactgtgccgttgcctttgtcatataagccatcttgccgaaagcttttgtgtaggtcaggccgtgataggattcgtccggggttgtcaggccggggaatttgtcggcatgtgcatcccagtcgaaattgccgctgtccacaaccgcaccgcctacgcttgtcgcatggccgtccatatacttggttgtagaatgcgtcacgatatcggctccccattcgaacgggcggcagttgatcggcgtagcgaatgtgttatccacgatcagaggcacaccatgactgtgggcgatacgggcaaacttttcgatatcgagcacactcatgcccggattggacaaggtttcgccaaacaaagcctttgtgttcggacggaaagcagccgatatttcttcttccgaagcatcagggtcgacgaatgtcacttcgatgcccaatttcttcattgtcacgccgaacaggttgaacgttccaccgtagatcgtggacgagcagaccatatgatcgccggcctggcagatgttgaatacggcatagaaattggctgcctgtccggaagatgtcagcatggcgcctacgccaccttccaaaacggcgatcttggctgcgacagcatcgtttgtcgggttttgcaggcgggtatagaaatatccgctctcttccaggtcgaacagtttggccatctgttcgctggtgtcatacttgaatgtcgtgctctgatagatgggcaggacgcgcggttctccctttttcggttgccagcctccctgcacgcagagggtttccagctttaatgaattgttcattatgataatgttttactatgtatttgttattatccggcaaaaataaggaatagtttgtttgtatcacaatatcttcttctgtaaaatacggaaccaaatgaatgcgacgatccctttcagcatactggaaatgctgattgcccaccagacaccggtgatgcccagtcccattgctgtcaacccgatcgccatcgggatacgaaggctgttgaacgtgatgctgatgatggcgggtgggagcgtgcggcccgtaccgtaaaataatccctgcattgttatttccagcatcatgaacaacatagagtagccgtcgatgcgaaggaaaacgcctcctgcctcataagcggccttttcgggtatgatcagtgagaatacttcgctgccgaagaacacgaaaagcaacgtacagaagattccgaacagggcagtcattttcagtgtcgtatggtaagcacccaggacacgttcttttttccgggcggcaaagttttgcgccacgaacgtgcttagagccgtgctgaatccttgcgaggtattccaggcgatcgcttcgatctgtccgccggctgtcatcgtcatcagtccgatgtgtccgccataggtggaggccgtgcgtgccatcatcaggttgataacggcaaacagactgtttagcagtgctacgggaagccccaactgaaagattcgtctgctgtagcggcttttcaaccggatgaagaacgggaatcctccgaatagccggtttttctttttcaggtaatagataaagatggccagtacggtcgcttccgacaaccaagtcgcacaagccgctccgtttgttcccattccaaacccgaatataaacaacggatcgagtaccatattcatgatcaatccgctaccgctgacgtagaacgggattttacttagtccagccgcattataaattccggtacaggcggctgccaagaaaatgaacggaaacccggttgccacgatcttgagataagatactgctgtgccggaaatttctgtgtcgagcttgaagaaactgatgatcggatttgccaggacgaacaacaggaatccccaacagacggaaatcatgagggcgatcgtcaggttgtgggaggcaaaggcgcgggcatcatcttcctcacgggctccgatgctttgtgccacgctgacttccgaacccactttattcagataggagatcgaagtcgtcatccacgtcaggataccgacagctccgatagcggctaccgcttcgctacccagacgccctacccaggccatatcggtgatactgtaggccatttgtataaacgaggttcccatgatgggaagcgccaggttgaacagttgctttttaataggcccttctgtcagattttttgttccttgcatgtttgtttatttaattcggggacaaagatacgatgttttccgctgaaaagatgtcggcatgcagcatgccggggagcttttgcctgaaaacagcctctacatgcctcatgccgggatgtttttgttggaaaacagcctcgcatgtctcatgccagcttctctataaacaaaaacagcctgtcgcgagtggcggcaggctgtacggataaaaattagtatcagaaattgatgtttaccccgatcatcgcgctgaaactctgcatcggatagccgtaatagagttcgtatttctggaacaggacgttgttcagtttcagatacagcccgaaggtgtcgtttagggtgtaagttccggtcaggttgagttcgttgatgtttttcatcttttcaccttccgatcttcctaagaacgtcttgcggccggttgctaaataataatccaaagaagcagttacttggctgatcggacggacggtgatgccggctgtcaattccatttcgggtttgccgtaagcatcttcgatatcgtcgacgttccaactattgtagacacctttcaggttgatgtcgaataattgctgatagctatatttcagattgacaccgccgaacgcatgttttgcatttgcttgcaaagctctactagtattggcaaaaatatcgccttgcgcacttggggcaaggagcgtcggagcaaagaaaacttcatcactcgtgatcttatatcccccgaatacatcgaaccagaaaccgggagcgataccgcttctgataccgaccgtcccatccagatagttacgggaaggaagcagctccatcgtcgggttgatatagcggttgacctgcgaaatttcgtacatgctgtttgagtagagtttgccaccggcaaccaggtaaagctcggttttatcggcaacttccacgtcagccgtaatattcggggaggccataaatttgctgttgtcaccggtcacgaacatgatgttcgcacctaacttcaaattccaattgtctcccgacactttgtaataaggcgaaagagttgcttcggcatggttttcaaattccagatattcctgtccgcccattgtcggcaggctgtaattgaagtattctacgtttcctcctaatccgatgcgctgttcaccgccgaaacgggcgttcaaatcaaactttacgtcgaacgtatgttccgtaggtccgtcctgctccttgcttaacgcatatttatgggagaagttggtatatccgagatctaacagatagccgacaggagcgtcttctttcgattcgactccgatctttgcctggatagtctggtttacctgattggtctcacggtcgaaattttccggaactaatgttactgatgattcgggactgtaaaccggtagcccgtagtaattgaatgcggagtatccgtatttgatccccatgtccaacgatagtttttcaaatgcgtgtttgaagttgagtccacctaagttatcattcaatttggccttaaccttgtcgaagtccgtatcgatatatttcaccttcccgttcgtcgaacgatgggagaaccagatattcagcttatccttgtccgtgctcaggatgtggtagcctaagtcgccgttcaggttcagatacgtaccgccgccgaagttgaaataaccgcggcgtttgttgtactggatatccgtcatgatattgcctgaaggcaggaggctgatctccttctccggatcggcggggacggtgaaagtcgcgtagtcgatcgccatcttcttgacaaccggttctttgatgaccggcaatgtgttcactttgctggcatcctgtacggtcgggtcatattcgcgttcaagcgtcatttcccggttcaggtttttttccttcgttttgtcttcctgtgcgctgacggttgcgacactccctaacagggccatcacacacagtgctttgatgttgtatattgtcttcatcactttttcttagttcttaagtttacccaatctattttctatcataccggcgatatcgtcgtcacctttataattgttctgcaggctggtgaggtattgacgagcctggaagtcatcaccctggcggatatagatgtcggccagcaggataaatccgcgagccagccagtattggtgaggcgtaccgttctcaatgaagttcatgagcaccttttcggcattcttgtcatcgttggtatcgtaatatagttgggccaacagatatttggcctccgcaccgtgtaccgtacgggtatctttgctcaattctttcaggtcggcaagcgccttgttcgcctgtttttgggcgatataggctttagcacgtacgtaacgggcttcggcttccagttcgggagagagcttcggttctttcagcaattcgtctgccgccagaagggcatccttttgctgtcccgtctgcaaggcgcagcgcatgatgcctaaacgggcggcctgtctgttctccggattctcggctacgatctgcaagcgtttgaagctttccaatgcggccggataatctttgctcaggtattcgatttcggccgtgcgggcaaccgattcttcgaggaacttggtgtcgccgctggcaatgaccgatttgaaccgttggatggcttcgtcgaactctttcttggcaaaagcgatgctacctaagtagaagttggcattcgaactgaacgccccttcagggaatgtttgcaggtagttgatcaggctacggcgagcaccgtcgttgtcaccgcgcatgaagagtttttcggcggcgatataggtcagcgaatcctgttcgcctacttccaagcggatgttgccgcctatggagttcacatagctggcataagcattgatatcgttgagatcgatataaacagacttcaaatcctgcaatgcgattttagcttcttcgctgcccggataattgctgatcacctgcttgtaggcggcgagcgccttttccggttggttgtcgttgtagtaaagtaaaccgagctggatgcctgctttacgtgccaggctgctctgaggaaattcgcggatcagcttttcgaacgcctgtgcggcggaagagctgttttcgagcaagacataagagcgtcctttctcgaacaacgcatcgtctacatattgcgattccggatattcgctgatcaggcggtccattgcgctgatcttgcctttatagtctttctgcaaccctaacaggaatcctttctggtagatcgagtaatcgccagcggaaggagacaactgggctgcacgtgaatagttttcttctgccagactgaactggcggttctgatacaggcaatcgccgatacggttgtaagcgtcagccaaagaagcggcctgccggttactttccaggtcgacatattggcggaaacggttcagggccgcactgtaatccctcagtttgaaatagctgtaacctaagttataataagccagagcatacatgtccgtattgcgctggcgcgtattgttcagatacgtgcgatagtccgatatcgcgttttcatattctcccatgcggtagtaggattcgccacgccagaaataggcgtcgttgcgggcttccatattataagaaccgagctggattgcctggctgaacaaactaacggcgtcatccagcttgacattggcaaaagcctgtgttccgagttggaaaaggatgtcctgtttggcttccagtatcttggtgctcggatgtttgatcttgttgattgatttcaaagcggcttcgtagtttttggtagtcaggtagacttcgaccagatagtcgttcaccttgtctgcgtattgcgagttaggaaaatcgttcaggaagtcttcgaagatcgtcaccgactcgccgaaccctgtaaatgccgtttcgtggatgagcaatgcgtagttgtacatggcgacttcctttatctgtttgtcgaatgaagaggtggcagcagcctcgaatgccatgcgggcattgtttttgtcgcctaacttcaggtaagactgtccgagatagagataggcgttctgtgtcagctcgtcgttctggcgtacggtccgactcagggagttgaccgcattactgtaattccctttattgaagtagcatacacctaaaatgtacagatcgctgcggagcgggttttccgtagatgaaacatatttgctcaacatccggatcgctttttcctggtcgcctaaatgataatatgaatcaccaacgatccggtacatctcgctgttgttcttgctatcgggatatagagagagaagctcttcaccttctttcaccaccttttcgtatttgctctggataaagtaaatctgtgcgatgtagtattgcgactgctcgcggtatttcgggctctctttcagacgggaaaactcgatcagagcattgttgtaattccccatcgcgtagtcgatgtaggcgacataataggtcgaggcttccttatatttgtctccgacctgctcgatccgtgcgaagtagccgcgggctttttccatctcaccggtctgcaacagcgaataagccagacggaaagaataagcctcctgctgttcgggacttaacatgtcgatatcggcttcgttgaaccagaaaatagctttttcatattcaccgcgttcgaaatgtacggaaccgatcatgtaaccgatctcgtcgctatggcgggaagctggatattcttccagatagtcttttagcaactcgtctgcattagggcgtccctgttcataagcggcatagaccagcatatagtctgcctcttggatcaggtcggcattcgtggaatgctgtttgtaagcctccaacttgtcaatgcaaccggcataattttttaaactaaacaactctttcccttctacaaataggcgatccggtgcatcaaactggtacgaccgctgcccgtatgcgacatgactccccaccactatgcacagtggaataagtattcttttcatcactccttagcttttataatacagatatatataaatataacggtatatgttggttctaagttgcaaatataagaaatatattactttatatagcggtctactgcttttttgatagattgcaatccgaaatcgtccggattcaactggttggctggcagaataatgatctcggctgcatcgtcttcagcttttgctccgtcgaaggattcggtcagacattcgaagaacatatcgaccgtatgtacctcgaagccggaatagggataaagattgggaatggaaaagagataacggcagccggcgatgtcaagtcccgtttcctctttcacttcccggtgggctgcatcttcggctgattcatacatatcaacaaagcctcccggcaagtcgagtgtccctttagcgggttctttggcacgacgtaccaacagcagttctccttttgaattgcggatgaagcaggcgacagccgaggaaggattgaaataatagacgaacccgcaagttgtgcattgtttggctttctcgttgcgttccacaaatgtcctggctccgcatttcggacaatacgtaaattgatgtaaaggatgggacatgatattttatttttaatagtcaggcacggatttcactgttctaacaaactgtgcaatccgcgaaatccgtgcctgaaatagctttgtgtttttattacttcacttcccaacccagtgcgcttgcgcccaatacggctgcatcgctttctttcaattgggagaataataattttgtcttgccttcgaacactttcaacatgtttttttccattgaacgtttgatcggattcataatcagatctccggctttagttaggcctccgaacaggatgatcgcttctgggctggagaatgcaacgaaatcagcgaatgcttcacccaggatgttacctgtgaattcgaagatttccaaagccagcttgtcattcttcattgctgcgtcatacacgtctttggatgtgatttcgtccggatccaattcgcgaagcaagctgtcatccttacggatttccagaaattcgcgtgccgtacgggcaactcctgtagcagaagcatatgcttccaaacaaccttgacgaccacaaccacaaggacgtccgttattacgacgcatgatcacgtgacctagctcgcctgcaaatccatcatgcccgtaaaccaggttaccgccgattacgatgccgctcccgacacctgtacctaatgtgatcacgataaagtctttcataccgcgggcagcaccatacgtcatttcaccgatagcagctgcattcgcatcatttgtcaatgccacgggcacaccacccaccttttcgctgattaactgagccaaaggaattttacctttccaaggaaggtttggtgcaaattcgatacaaccgttaaagaagttaccgttcggagctcctacacctataccttttattttatctacaccgcctgcctggtcgatcactaatttcaggccatttgcaagttcgctgacataatcgtcgacatcagtatactttccggttttaattgaactactgtacaagatcgttcctcttgcatctactacgccaaaaacagtattggtaccacctatatcgatacctactacataaggcttctccatgattttatattttagattaataatgctttttctggaaagcaaatataagaggaatctggtaaggtacaatgattttattcaaaaaaaaccgaaatggacgtgaatatgttacccgatatgttatttagcaggtaaaatttcaatccaataatcgtctggatcattgatgaaatacaagcccatctcgttattttcgaaacagatgtatccgagttttcggtgatattcgcgtaccttgtcataatcgccggctacacggaaacagagatggctttcattgtctcctaattcgtatacttctttccggtcgcgaagcctggtcagttccaacagaaatcctgtctcgttgtctgtcagataaaccaaggtgaacgaaccgtctgtcgcttccttgcggtggtgttctttcaaaccaagcgcttttccataaaacgcaatacttctgtccagatccaggacattgatattaaaatgatcaaatctgctctttatttccattttctctctatttttttattttccattttcaaatgtctgtcccttctcccggaacggatatcaacgcataccggcaaccacgcgattccgcgtaaggtctgaaagcaaccacctccgccggacgatcccaaaaatgcatcggtacaaagatattggttttgatatgatctacaaactgttgtgcaccgcgcatgaagtcggtcccgatacgcggatcgaccggaaacatggtagcatctagcttgtcggtcgcctttgccaaatcacctaattctttcagataattttgttctgcttctgcgacttcttcgggagtcgattcgtctttccagtgccagttatttaggtcgccggcatggaaaaggcgtttcccttcggcttcgatcaggaaggatatgccggagtctgttgatccgaatgccttgatccacaggttatgatcttcataagaatcttcttttttgagatagattgcatcttctttccctgcccggttccttttcaaaatatctttgccgaaaagatagacgatatcttttttgtatgttttccatctcaaaacctccggattgaaatgatccggatggaaatgggatgacaatatatataatgtacccgcacgattcaatagtttctcatgcacgaaacctttttccggtgacctccctgtgtctttataataatcgatcaaaatggcaaattcgtctgcctcgatagcaaaaccactatggtagatataagtaagtctcatgtatattttcctttctttttataaacaaaacacggatggtcgcattcttgttgtgcaaatcagcgttcgtttgcgtccggtcaatgctgattacgatattacaactttatttccagttgctccatcatcacccctgtctttcggcgtgcatcggccacatccaatccgcgtgccagcagcactgccatacggcgatgtccgcggacttccggtttaccgaagaagcgcatttgggtgtccggctgttccaagaccttatccaggttgcctaatgaaagttggttgctgtccccttcgaccacaacagcacgcgaagcgcctgcaccgtgaaaagctatgttcgggatcggtaggcctaatatagcacgggcatgcaaagcgaactgcgaaagatcctgcgtgatcattgtgaccattcctgtgtcatgcggacggggagagacttcgctgaaaatgacatcttcgcccttaacaaacaattcgaccccgaaaataccgcggccgccgagcgcctccgtgattttgcctgcaatttcgcgtgccttttctttggcaaccgggttcattgcctgtggttgccaggattcacgatagtcgccgtcaacctgtacgtgtccgaccggttctaggaatgatgtgcctccaatatgacggacggtcaacagggtgatttcgtaatcgaaatcgacaaacccttccacgatcacttttccggcaccggcacgtccgccttcctgtgcatagtgccaggagcggtcgatatcttcttctttacggataatgctttgtccgtgtccgctcgagctcatgatcggcttgacgacacatggcattccgataactttgacagcctcgataaattcttcttctgtctcggcaaaacgataaggagaggtcggcaaacccaattcctcggcagccagacggcggatgccttcgcgattcatagtcaaccaggtggcacgggctgtcgggatgacatggaatccttctttttccagttccatcaacgtctgtgttgcgatggcctccacttcgggaacgatataatctggtttttctttttctacaatctcgcgcaaagcgtctccgtccaacatcgatacgacatacgaacggtgggcgacttgcatggccggagcatctgcatatttgtccaaagcgattacttccactccataacgctgtaattcaattacaaattctttgcctaattcgccagaaccgcagagcaaaactttcgttgcggtagccgacttcggtgttcctattgttaccatatttattgaatgtattatatttcttttgttcataggtgcaaaggtacagtaatattggcaattgacaagtggttctcaataggggatttccgaatggatacaagtgtaatctgttttcgacattgtagaaaataaaatagatgcaaatctgattaggtttccatgcagatgtaaatgtcgttttctacaaagaaatatatacctatgtgaggttaatttgggttaaatataagtaccttgtgatacaaggtatcttggtaaagcatatatttgtggcagttaatgacaaaatatttttctatttatgtaacgatttcgcaaaatgttcgtctaatagataaaagtaacaacaaatatgatgattcatctggaaggaattaacaaaacgtatttcaacggtgcgccgctgcacgttttgaaaggcatagacctggatatagagaagggagagatggtgtctattatgggcgcgtccggatcgggaaaatccacactgctgaatatcttgggaatactggatacatacgatacgggcacttacaccctgaacgggcagttgatccgcaatctgagcgaaacccgcgcggcggaactgcgtaaccggatgatcggtttcatcttccagtcctttaatctgatttcattcaaaaatgcgatggaaaatgttgccttgcccctgtattaccagggtataagccggaagaaacggaatgctatggcgttggaatatttagatatggtcgggctgaaagactgggcggaacatatgccgaacgaaatgtccggcgggcagaaacagcgtgttgccattgcccgcgccctgattgccaagccgcaggtgatcctggcggatgagccgaccggagcgttggacagcaagacgacggtcgaggtgatggagctgctccggaaagtaaacctcgaagggctgacgatggtgatcgtgacgcacgaaccttccgtggcagaggcaaccgaccgcattatccgcgtgaaagacggtctgatagaaacaatagaaaaaggattgggacatgtttgactttgataatttccgagaaatatggagtacgatccaaaagaataaactccgtaccttcctgaccggcttttccgtagcatgggggattttcatgttgattgtcctcttgggggcaggaaacgggatgaagaacgggatcatgtcgaactttcgcaactttagcctgaatcgggtggagacatggccgcgctacacgagcaagccgtacaagggaatgcagatgaaccggaggatcgaatacaaagatgaagatctgattgccatccctcgcgaaaatcccgaagtggatttgatcacggcgagtatcagccggagcgatacgctttcctacggagacgaatataatgcctattccctgaacggagtgcacccttcgaaggcggtgattgacaatatcgaaatgacggtaggaaacggccgttttatcaatgatatagatgtaaaggaaaaaaggaaggtgattgtcttgagtccccgcatgaaagaagtacttttcaaaggcgaggacccgttgggcaaatatgtgaatgccggaagtgtcgcataccaggttatcggtgtctataaggcggaggacaacgacaacaacgcgccggcctatatccctttcagtacggcgcagaccttgtataacgccggctacggactggatgagatcatctttacggtgaaaggtatttccacgcaggaagaatttgacgctttcgagaaacgtttccgccagcagatgggagcgcggcataagttcgaccccgaagaccggcgggcgatcggtatgtggagcacgctcgaaaacttcatgatgctgaacgggatgatgaacggtatcgctctctttatatgggtgatcggcatcgggacactgactgccgggatcgttggcgtgagcaacatcatgctgataacggtgcgtgagcggacgagggagttcggcatccggaaagcgataggggcgactccgttctccattctgaaactgatcattgtcgaatcgatcctaatcacggccgtgttcggttatttgggcatgatcttaggaatcgggctgacggagggaatcaactcggtcatggagatgatgaatgccggaaagaatgtttcgcaggatgacatgagtatcttcctgaacccgacggtgaacctcggtgtggcgttgtctgctacggccttgatcatcggagcaggtgtgttggcaggctatttccctgcccgcaaggcggtcaagatcacggcgattgaggccatgcgcaatgaataattggtaattgaaaatagaaagattatgttcatatttgatatagatcgctgggtggaaatatgggtgacgatcacccgtaataaaacccgtagcttgctgaccggcttcggtgtgttctggggcatcctgatgctggtgatcctgttgggttccggcaacggttttaagaatggcgtgttgaagaacgtcgacggtttttcgacgaactccgcattcttcttttccgaacggaccggcgaaccctacaaagggtataagaaagggcgttactggcagatgcgcaaccgcgacttggagacgatccgccagcgtgtgaaaggagtgcgctatctttcgccgatgattatgcaatggggcggacagaataatgtagtgagaggacagaaagctggtacatataacgtgcgtggcgtctattctgaatatttcaatatcgaaacgcagcatatcttggcgggacgcttgttaaatgaaatcgacatgatcgaaaagcgtaaggtgtgcctgatcggtaatatcgtgtgcgaagtcctttttgccccggatgaagatccgatcggacagtacatacgggtgaatggcatctattaccaggtagtcggtgtgatcaagccgaagccccgtgcccagattggcgggcgtacggaggaaagcgtaatgatcccgtttaagacgctccagcaggcttccaaccagggagacaagttctggttcctctgtgcgacggccgacgacggttattcctgtgataagatggtggaagacataaagacggtcctgcgttcgcagaacgaaatttccccgacggacgaacatgctatcagcagctttacgatagccaaacagttcgaaacattcgatatgttgttcaccggtattaatattctggtttggcttgtcggtatcggaactctgctggctggtattattggggttagtaatattatgatggtgacagttcgggagcggacacgcgagatcggagtgcgccgtgcgattggtgcgaagcctttcgatattatatcgcagatcatgagtgagagcctgctgttgacatcccttgccgggttgatcgggcttagcgtgggggtattcctgctcgatgtggtgaacaatgcgatggcaagcggcggagatgtgtctaacgacacgtttttttccaatcccgaaatccatatcgggacagcggtggcagctaccgtaattctgctgttcagcggtctccttgccgggttgatcccggcctggcgtgccatgcagatcaaggcgatagatgctatcagggaagagtgaattggatttatgatttatatttgtgtctacgtataaatcataaatatttccattgtcaattaataaaaaagtatagttatgaagaatcgtatcgtaaaaaaagtcctgcggatcatctttttggtatttgtgggagttgctgttgtcggcactttctatttcttgtggaagaaagcgcaacctgtcattaccctctatgagttggttacccctgcacgtgacacgattgagacgaagaccgtggcgaccggaaaggtcgaacctcgtgatgaagtccttatcaaaccacaaatgtcgggtatcatctccgaattgctgaaagaagctggacagatggtgaaagaaggggagatcattgctcgtatcaaggttattcctgaaatggttcagttgaatagtgccgaatcgcgtgtacgggtggcgaagatcaacctcgaacagatcagtgctaccttcaagcgggataaagagttgcataaacagggggttatctccaaagaagattacgaaacatctcttgccaactataaaaaggcgcaggaagaggcagagaacgctcaggatgctcttgagattatccgtgaaggtatctctaaacggtctgccgcttccagtacgacacaggttcgttctactatcaccggtatgatcttggatgtgcctatcaaggtcggtaactcggtgatccaatcgaatactttcaacgacggtacgacgatcgctactgttgccgatatgagcaatatgatctttagggggaaagtagacgagacggaagtcggccgtatccatgaagggatgccgatcaaattgacggttggcgctatggaaagccgcacgttcgatgctgaactggagtatgtggctcctaaaggtgtggaagagaacggggctgtgctgtttgaggtgaaggcagccgtgcatatgccaggcgatgcctttatccgtgccggctacagtgccaacgccgagattgtgttgaagcgtgcggagaatgtattgtccgtacccgaaagctgtgtcgagtttagcggtgattctactttcgtacaggtagtaaaagcggaaaagccggaacagaagtttgaaaagcgtgccgttaaggtaggtttgtccgatggtatcaagatcgagattaaggaaggtcttgccgaaaacgaaaaggtacgcggggcgattgtcgatccgaataagaaataattgtaaacgataaaatgatgagaagccaattaataatagctacgactttgtttctttccggtacttttgcttgggggcaggaactctccaaacgatggtctttggaagaatgcatccgttatgcaattgagcataacatcgatctgaagcaaaaagagcaggatcaggaaagccggagagtagaattgcataccagtaagttcagttggttgcccgatctgaatgccaatgtcggacagaacttcgactttggacgttctccttccaaatcaggtgtgattgtggatcagaactcggctaatacttcggcatctgtctctttgagcatgccgatattcgacggcttgcgtattcccaacgatatcgctgcccgcaagctggacttgaaagcggctgtcgaaacgttgaataaggcgaaggaagacttgtcgattaatgttgcttcctactatttgcaggttttgtataataaggaagtccaaaagattgccgagttgcaggttgcgctgagcaatgagcaggtcgtgaaaaccgaagcattggtaaagaacgggaaggttcccctttcccagttatacgatatgaaagcgcagctagcgaaggacgaagtctcgctgaccgaagcgcgtaacaatgtgaaactggcattgctcgacttgacgcaaagcctcgaactggaacgcgacggtgaaaatttcgatatcgtagtccctgaaatagaagatgcggttgaacagtatatgggcagcatccttcctccggacaatgtctatgatcatgctgtcgctttcaagccgcagatcaaggagcaggaatttctcttggaaagccagaagaaaatgctgaaagtggctcgggcaggttattatccgaaactgaatttcggcgccagctacagcaacggctattaccattattccggtgatggcgaatatacgaatcttcctttcagcgaccagttgaagaataacgggcgtaagacgatcgggttcagcttgagtatcccgctgttcaaccgctttcaggttcgtaacagtgtccgctccgcccgtatcaatatccggaaccgggagttgatgatggagaatacgaagaaggtgttgtataaagaaatccagcaagcctactacaatgcgactgctgcccaggagaaatataccgcatccgacaaatctgtcctcgctagcaaggaggctttctcttatgccgaagaccgttatgccgccggtaagagtacggtttttgaatacagcgaagccaaaacgaagtatgcccagagcttgtccgaacaggctcaggccaagtatgacttcattttccgcaccaaaatcttggacttctataacggcacaccaataacactataacatatttaggttagacacatttgtttaagaaaaagaaggtctctgtgatggaaaccttctttttgttcttatatttgtccgagagattatgatttacaattcaaggaccatgaaagtataatcgtttaatggagtggatctaatattaatacctagaaaaacatattatgaatgcaagatttgtgacattagttttgctgctattcgtttggctggagggggacagcgtttgggcccaatatcttcccaaactttatcaggttttctctcccgacaaaaagttgaagatggctattcagcgacataacgacggtttgctgacctacacttttgcagctaatagagaaatattgatcaaagaatctccgctgggtttcaaattggaatcacaggagacggttccttcttccggttggaaaatagagaaagtatccgaccggaaagtacgggatgaatggaaaccgctttggggtaaacgggctgtggttgaagatcattttaatgaattggtgatcgatttggtgaatctggccggacaaccggagcggatgcagttggttgtccgtggatataatgacggctttgcattctgttataaaataccggatggaaaaggaccgtgtgtaaatgtgcagtccgaattgacggcctataactttgcaggagattatacggcatggttctataatggcgaaaatcataatataggacccgaaaagttgacggaaacagatggaacccgtttgccggtgatgaccgtgaaggcgggtgataaacattatatggcaatccatgaagcctgcctggaaacaggagcacctcttgttttacaatctaagggggggaatcgctcttttcggtcgcttccaagccgaccagtctgtcgccgggatatacatcagcctggcgtgtcgttttgtatgggacgacacctggcgtgttgaccgattcccatttgttggagttgctgaatccggatcccgactctcgttatgatttttcgtgggtgaaaccggggttggctgtctgggactggcgtatcaacggagctgtgtgggatggatttacatacgggatgtcttatccttcctgggtacgaatggtcgatttcgctgccgagcagggtttcaaatacctggtgttggatgccaattggtatggaccggaattcgaatcggattccgatccggttaaaggagaaaaagcgcaggatgtgcaacggctgttgaaatatggaaaagagaaaggtgtcggaatctggctttatctgaatgatgtcggaggtcggaaatatccgatagaaaagaccttgaaacagtatggggattggggagcagccggggttaaatacggttttatgagcggaacacaagaagaaaagaaccggtggacgaaaaagatcacggagctttgtgctcaaaatcacttgttggtcgatttccatgacggtccggttcatccatacggacaaatgcgtacttggccgaacgctgtgacacgcgaatattgccatgcctagttggacggacatcatgtgttcgagcctaaaacatttgtgacgaccgttttcgtcaatatggttgccggtccgatcgatatgaacaacggaatgtttgaccttcgccaagggcatacgacacgtgtggacgagagtcagccggttccttccacactggtttcggaagctgcccgtacgttgattgctttttctggcgtgactattttgccggatattccagaatactaccggaagtacccggctttgttgaacttcctgtctgcccaaaagatgccgtggaaagagagccgtaccctggccggtgaaatcggggagtatatcgtgatgatgcgtgaaacggaggatgcctacttagtcggtgcggccacgaatgagtccggaaggacgatagatctgcctctttctttcttggaaaaaggaaaatatactgttgaagtcatcgaagacggcgacgatgcccactatctgacaaaccgggaaagcttgaaagttacgactcggcaactgacaaacaatgataaactgacattgaagttggctccgggcggtggtgcgtgtcttgttattaagaaaactccgtccatgcgtgttggtgagcaagcggcttttccgcttgtcagcccttccgggaaaattggtcgaaaataattacttcgttcttaacttgaacgaacctaatcagattgcgaacactagctggatcaagcccggacaggtaattcgtgaagttacattgacaacggctggcagtatggctagtattgattttgccgcagaaaacaatatagcctatgtgctgtttgatgccggttggtatggggcggaagaagatgtgaaatcggatgcgaccaccgttacggttgatccggcccgttcgaaaggaccgcttgatttgcctaaagtaatagaatatgccaattcaaaaggagttggaatactggtttatgtgaataaaaaggcactgcatcagcaactggatgaaattctgcctttatataagaaatgggggatcaaaggtgtaaaatatggttttgtgaatgtgggcgaccaatacgctacggcatggttgcatcaggcagtacgcaaagcagccaaatatgaattgatagttgatatccacgacgaatatcgtccgacgggttattcacgcacgtatccgaatttattgactcaggaaggtatccgcggtgacgaagaaagcccgtcgctagaccaagccatctatacattatataatcgcatgatttgtggagctggtgattataccaattgttattttgcggaaagagtcacggaaaagatgggaggacgtgctgcccagttggctaaattggtcgctatttatagtccttggcagtttgtctattggtatgaccgccccgaaaaatcaccgaggcgagccggtggcgcaggctctgccgaatctgtgatcaaaacagatgccgcaactcgtttttataattctattccgaccgtatggggcgaaacccgcttcttggatggagaaatgggcaaatatgttgtggtcgcccgccgttcggggtccgattggtatgtaagcatgttgaatgccggagacaagaaacaaatctccttaccccttgattttctgaaaaacagaaagggctataccgccacactctattatcaggcttccgaggagaaaaaggatgtcgtcgataccaagaaaatcaggttggagaaccgcaatgaggttatcattgatttggtcggtaatagcggctgtgtgctgcatttttcgattcttaatttccaatagatttatttcaaattacgtggtaagccggaggaaatgttccttctccggctttctttttatttatctgttatcggcttcttttttccgataagaggaaggagatattcccatgactttggtgaagacacgggaaaaataggcctgctcctcgaatccgagccgcatcgcaatttcgttcagtttcatatccgtaagttcgatatactgacaggctttctgtatttttaggcgtgtaaagtaattgatgggggaagtacccgtttctttctggaataaggtggaaaagtgagattccgaatatttgaaatattccgctaaatcttttaaggtcagattggtttccacgtgttcttgtaagtaatagataactcgcatcgagaatgaattttctttgtgggtcggaagatcgatatggcggaactgttcctgaaaaatgaaagttgagagaaacgtatataagcacatggatgaataagccagatattcttttatgtaacctctggcaaaactactgtatatctcttcgaatagacggatgcggacgagttgccgtacatgttcgtctgctaatatttcttgaggagcggggttgggagaaaggaatgattcggttagcttaccacagaaatgaatccaatagattgtccaaggatcatggctatccgcctcaaatgaataagggacatgggggaggtacgatgatatactgatttttctgtacgggacttctcccgccgggccttttacctatatggagaacagtccggtttcttataaaccgaccggttttatcggaggggcgggacatggttgtatctttacggccggtagtgagaactattggaaagccgcgaccaattcaatttccgtccggcatatgtttgaacgcagggtctctttctatccgtccggctttgataaagacggctatttgtttacgaacacctatttaggagattacccgatgttcctgcccggaggaaaggaacagatcgccggtgaatatcaacccgggtggatgttgctttcgtatggaaaaaaagtgagcgtatcttcttcgctggaaggttatccggcagaaaatatagtggatgaggacgcccgtacggcttgggtcgcccaatcgaaccgtgacatggagtgggcacaagtagatttgcaacggctttcgtctatccatgctattcaggtgaatttcgatgaatacggggctaatcaaaaaggtgctgtctccggagtttaccagagctatctgatttacgcttcggtaaatggcgaagattggtctttggtggtggactatggtacaaagaaaacagacactcctcatgattatatcgagtttgaagaaccgttcaaagcccggtatatcaagttgcaaaacaaggagtatatggtgtcggaaaatttttccgtacgcgatttgagaatttttggaaaaggtcaggggagtactccgcgtgccgtaaatgatttcacggtggaaagggatgaggccgatccgtgcaaggcgcgtctttgttgggaggctgttccggatgctcaggggtatattgttcgctacggaatagccggagacaaattgtataataatttccaggtgatgggagaaaatacattggaaatcggaagtctgaataaaggggttgcttattattttacgatagatgcctataatgagaacggtattacccggacttcccggataaaagtttgccgttaatcaacagacttctttttacctcttcagctttcccacaaacatcaggttattgtcgttctcatggagcgtagcagccaattctttcagttgggctttcgcttcgggaggacatttgccggaggcgagatgggcttcgatcatatcctgaagtgcagccggttcgacattgaaaatgaatctgcccttgttgaagtggttgttcggattgggaatcgggagattcccgtagaagtcgttgaccaggtgatattgggaagatgacattttcatcttatctaccagtatgtctcctccgggtgtgaaccggcctttatcccaagtgtagtagtggatgaggatatgattaggcagttccgtgtagatatggataggtttttgagcaaaaccggtgaagttcatcgtgaaacgggggatcagcttgtttgcttccgtatcgtatgtgaaagtcgtgtcgatgccggtataaaagaagtcgaatgtcccggtattccggtaggaaaatatctcattgtcgaaatttcctgccaacatatagtcgagtgccggtatttgtgataggatgttcccgttcgtgtccatccggaaagcgatcggcgtcccttcttcaaaaggcatgtgtacgaccgagagcgtaccgtcggcattgacctcgattttcggtttgttgatttgtctgggaagattgatatcttttatccatttcccgtcaaggccgtacatcatgattttcttcccataaaagagagagaggaatatatggccgcctcgttcgtcgatactcccgtcgtagatagtcaccggatactcgcccggtccgtttcccattgcacctatgttgcagaggaattttccgtccttgtcgtatagcttgaccacgttggattgctgtcgtacgcaaatgtagttatcgctcacctcgatccaccaggccttgaacagggcctcgtcggaggtttcaaaacgcacgatccggcaatcttcgaccagttcgctaagtgggatatcaatcgtatcgcctgccgctttcaggtcgcagatgtaaagcgggccgtccgggttttcgattatcctgacactgccgtcgtcagttaccaacgatttcggaacggaggaattacaacttgcaaggcttgccagaaggaaaacgatagcgggaaggaatgcttttgttttcatattcacgtagatttaagtgattataaaaacaaaagtatgaataattcgtagatacgaactattcatacttatataataattaaatgattaatgtaaattaacggatgaacaacagttccctatatttcggcagcggccacatctggttatcgaccatcagctccaggtcgtcgatgtggctacggatttcgtccagatagggagcgacggtatcatggtaagcgatcgctttggtacgcaaatccgtgatacggtttgcttttttgcgggcttccaccatttcgtccaccatgcgagtgacggaacagatatgtccggcaatcttgcgaaccaggcgtcggggctcttccgacatatcgtcatattccggatatccgccgaaagtctctttcagtttggcgatgttgtccaatagcaatgactggtagcggacggcaaccgggatgatatggttgagcgataggtcgccaaggacacgagcttcgatctgtacctttttgatatagatttcccatttcacttcgttgcgggcttccaattccttttcgctcagtacacccgtttctttgaacatccggataacttccggtttcaggtaagcatcgtattgtaatggaacgctgttttcgcaatccaggccgcggcgggcagcttcttccttccattcgtcgccgtagccgttcccgtcgaaacggatcggtttggattccttgatataggctttcagcacttcgaagatggcggcctccttgctcttgccttcggcacgcaaggcttcgacatcctgtttgaactggcggagctggtaggctacggcagagttcagtgccaacatcgccgaaccgcagttggccgacgatcccaatgcacggaattcgaaacggtttccggtgaaagcaaaaggagaggtgcggttacggtccgtattgtctaacagcagttcggggatctgtccgaagccgagatgcaggcgtttcttgtcgtccacctcgatagcgtcttcgatggaacagttctcgaacttatccagaatttcggtgatctgtgttcctaagaaggatgagatgatggcgggaggcgcttcgttggcgcccaggcggtgcgcgttggtagccgaagcgatactggctttcagcaaggcgttgtatttataaacggccatcagcgagttgaccacgaatgtgatgaaacgcaggttgtcttcccggtcctttcccggagagaagaggttgatgcccgtatcggttcccatcgaccagttgcagtgcttacccgaaccgttcacacccataaaaggcttttcgtggagcagcacgcggaagttgtggcggcgggaaacacgtttcatcaccgacatcaacaactggttatggtcgttggcgaggttgcattcctcgtaaataggcgctagctcgaactggttcggggcaacctcgttatggcgtgtcttgaccgggatgcccaacttgtagcattcagtttccaggtctttcataaactcctgtacacgggagggaatggctccgaaatagtggtcgtccaattgctggttctttgcgctttcgtgtcccaacagggtacgttccgtcagcgacaggtcgggacgggcggaatagaggtcttcgtctaccaggaaatactcctgttcccagcctaaataggtgatgactttattgacgtcttcgttgaaataatggcaaacatctttggctgccttgttcaaggcttcgatggagcggatcagcggggtcttgtagtccagcgcttcaccggtataggcgatgaatacggtcgggatacacaaggtgtcgtctacgataaacgcaggtgaggaggggtcccaggccgaatagccgcgggcttcgaacgtgttgcgcaatccgccgttggggaagctggatgcgtccggctcctgttgtgcgagcagcttgccgctgaattcttcgatcatgccgccgccgccgtcatgttcgacgaatgcgtcgtgcttttcggctgtcccgtcggtaagaggctggaaccagtgtgtgtaatgtgtgactcctttttccagtgcccacatgcgcatgccggcagccacatgattggctatttcgcggtcgataggggttccgttgtcgatggcatgggtcagggctttgtaggtttccttggagagatacttttgcattgccttccggttgaagacgttctcaccataatattcggatactttctgattgggagtaatggcttccactgcctttcggttggatgctttctccactgcattgaagcgtgagattgacatacagattgtttttatgttataccggctgcaaagatacatgcaattctccatgaatgctttcatccggtagttaaaaatagatgagtaggaaacgatttgtcccggcgcatcccgtttggcaatgcaccagcttctctaaagctatgcattaggttgcgtaacccatagctttagccttcataaagcatagctttacggtagcctttttggggtgtctgtcctttcgaatgagggcgtaaatgaagattcaaacatttcatcgcgtgggataaataaaaaaggtgtattaagaaatgctattattgattatcagtgatttatggtgataggtgataggtaaacccccgtttctgtaaaagtttaggaaaaatgaattaaaaaacgccgcctttaaggtgacgttttttaattcaaactcagaaaagttttacaaaaaggccttttcacctatcacctatcacccgatcagaacaaactccaggctactgtcaatcctgccatgacgatcgctaccatgctcatcagcttgatcaggatgttgaggctgggaccggaggtgtctttgaacgggtcgccgaccgtatcgcctacgactgtcgccttatgggcttcgctgcccttgccgccgtggtttccttcttcgatatgtttcttggcgttgtcccaggcgcctcccgaattggccatgaagatcgccagtacgaacccggtgctcaggccgccgatcagcagtccgaccactcctgtcactccgaatatcagaccggtgaggatcggtgcgatgatggctaacagggaaggggtcaccatctcatgttgtgccccttttgtcgagatggccacgcaacgggcgtaatcgggttcggcttttcctgttagtattccggggatttcacggaactggcggcgtacttcctccaccatgtgtccggctgcccgtccgactgcattcattgtcaacccgcagaacatgaaagccatcatggagccgaggaacatccccgccaacaccttcgggttcataagtgtgacatcataatagatcataaagtcggagaaagaggcttttgatacctcgatggctttgccgtcggaaaatgtcaggactgtttcgcccaaccggagcaagcctattttaatctcttccacgtaagaagccagcaaagccaagccagtcaaggctgccgagccgatcgcaaaccctttgcctgttgcggcggtcgtgttgcctaaggagtcgagcgcatccgtacgtttgcgtacttctttgcccaagccggacatttccgcattgccgccggcattgtcggcaatcggcccgtaagcgtccgtagccaaagtgatccctaatgtcgagagcatcccgacggcggcgatgccgatgccgtacaaccccatccctacattgttgaaatcgaagccggaagcaaaaaggaacgaacagatgatcccggctactacggccagtaccggaatggcggtcgatagcatgccaagccccaagccggagataatcaccgttgccggtccggtcagtccggcctctgaaacccgctgggtgggcttataagactgggaagtatagtattccgtcgattggccgatcacgatccctaccaacaatccgattatgaccgaacaactgatccagaaccaattgtccaactctaacaaataaagaatgccgaaagtggagagggcgatcaacacggaacttaggtttgtccctatggcaagcgctttcagcagctcacgtatagtcgcattttccttcgtgcggacggcgaagatgccgatgatcgacaatacgatcccgaccgcggcgatcagcatcggcgccacgaccgccttgtattgcatctctacgtcgccggacgccacgaatgcggcagcacccaatgcggaggttgccagaatggaaccgcaatatgattcgtacaaatccgcccccatgccggccacatctccgacgttgtctcccacattgtcggcaatggttgccgggttgcgcgggtcgtcttcggggatgccggcttcgactttgccgaccaggtcggctccgacatcggctgcttttgtgtagataccaccgccgacacgggcgaagagtgcctgtgtggaagctcccataccgaaggtcagcatggtggtggtgatgatggtcagtttatgtgtggcatccatcgtttctgccggaatgcagatattcaataatatgtaccagaacgaaatgtccagcaagccgaggccgacgacaaccagccccattacggcaccgctcctgaaagcaacctgcaagccgctattcaaagacgaccgggcggcattggcggtacgggcggatgcgtaagtagccgtcttcattcctaagaaaccggcaaggccagagaagaaaccgccggtcaggaaagcgatcggaacccattcgttttgtactccgaatccatacgccatgatggagaacaaaaccaccagggcgagaaacaccgaagcgacaaccttgtattgttgtttcaggtatgacatagcccctttgcgtacgtgccgggctatttttgccattaactccgtcccttcactctctttcatcatctgcctgaagaagaaccaagcaaataccagtgccaggatggaggctaccggtatgatccaaaaaataggtgtaatcatagcaatgagatttaaaattaatacgaatttaatcgttttgacacttagcgtcttacgatcctttattgttcatctgtaaatataacaaaaataaagaagtagagaaactttttcgtaaataataatgtttcattctaaaaaaaacagcatatttgtcacagaataagaatgaaaacgcaaatgacggaagaaacgaaccataatgcctataaattaggcttggctctgagcggaggaggagcgaaaggtttcgctcatatcggagtttttagattactggaagaatgcggtctgaagccggatatcatcgttggtacgagtgtcggttcgttgatgggtgctttgtttgccgatggctatacgtccgacgaaattaaagaactctttaccggtcgtgagttctccgaattcgcccagttgcaaatcccgaaatcgggattgttcgacagcaagcggttccgctattttcttcgtcgtcatttgagggctaaaacgtttgaagagctgaaaactcctctggttgtcgtggcgaccgatcttgacaatggcgagagccatgagtttcgtagcggtcccatcgtagaggcggtgaccgcttcctgtagtattccgattatctttagcccggtcgtgataaacggagtgcattatgttgacggaggtcttttccataatttcccggtttcgatcatccgtgaagagtgtgagcgtatcatcggtgtgaatgtcagtccccttgtcccgcaaaagtacaagcagacgattttccatatcgcggaacgttcctaccactatatgttccgggcgaacacgttggaggaccgcgagatgtgcgatgtcctgatcgaggcggaggagttcggtatgtataagacattcgatctggaaaatgtggatgagatcgcgagtatcggatatgctgcggcgatccgggcattcgaggtcgtgataaaagaaaataaatatgaaaccttggtgaacgctattatggcaagaagaaacaacgccttgatgccatagttttttccggaagttccggtgttcaccccaaatattaactaagttggcaaataacgcgatgaaacaggcaaataagatggtaatatatcaggtctttccacgttggtttggaaatatgaaatcatccctggtgaagaatggaagtaaagttgaaaacggagtaggaaagttttcggactttacgccggttgctttgtccaagattaaggagttgggaaccacccatatctggtataccggagtgatcgaacatgcaacgaatactgattatacggcttaccagatacgaagagaccatgcggcagtcgtaaaggggaatgccggctcgccttatgcgatcaaagattattatgatatagacccggacctggccgataatgtgcctgaccgtatgaaagaattcgaatcgctggtcagaaggacgcatgaagccggaatgaaagtaatcatcgatttcgtacctaatcatgtggcccgccagtattattcggatgccaagatggcatatgtggaagacttggggcaaaaagacaatacttcgaaagctttcgatcctaataataatttctattatataccggggcagactttgtgtctgcaattcggtgctcagcaggaagattttgaatatagtgaatttccggcgaaagtcacggggaatgattgcttcagtacctgtcccggacaaaacgactggtatgagacggtcaagttgaattatggtgttgattatgtgaacggccgtaccctgcattttgatccggttcccaatacatgggcgaagatgctggatatcctgcttttctgggcggaaaaagggatagacggtttccggtgcgatatggcggaaatggttccggttgaattctggaactgggtgatcccgaaggtgaaacaggcttatgatgtttgttttattgccgaagtttataatccggcagaatatcgcaattatatctggaacggacattttgattatttgtatgataaggtcggactgtacgatacggtacgggcggtcatgtgtaaccaggctccggcaagcaatatctccggatgctggcagtcactcgaaggcatccagcataatatgttgaacttccttgaaaaccatgacgagcagcgtatcgcttcttacttctttgccggtgatccgcgtccgggaattccggggatgatcgtgtcggctatgatgaataccaatccggtgatgatctacagcggacaggagttaggagagccgggaatggacgatgaagggttcagcggacgtgatgggcgcacgacgatttttgattactggagtcttgccagcttgcgtaactggataaacgagggagctttcgatggcggcaaactgactgccgaacaacggcagttgcgcgaggtgtacgcaaagatcttgaatatatcaaagtccgaacgggttatcacggaaggagttttctatgatttgatgtatgcaaacctgagcaatccgtattttaattcacaccgtcaattcgtgttcatgcgtaaatatcagaatgaagtgttgttagtggtggtcaactttgacaaggcagagcagacggtacgcatccaaattcctgacgaggcattcaaggcacttgatttcggggacaacaaagctgccgtacagaccgatctgatgactggagagaactgtatcagcacattgacggctgcttggccctatcaggtcgttatacctgcttattccggtcgtttactgaagtttacatattgatttatgatttatggtttgtgatttatgatctgctctgaccgatgtgtttggtaataaatcataaatcataaatcataaatcataattgttttgtacctttgcactcacaattcaaatctatttacttaagataaatattcggaataatgagtgcacaaactcctttcttggtgttttcgggaactaactcccggtatcttgcagagaaaatttgcaatagtcttggttgtccgctgggacagatgaacattcaacactttgccgatggtgaatttgccgtctcttatgaagagtcgattcgcggtcgcgatgtattcctggtacaatcaacgtttcctaactctgataatctgatggagcttctcctgatgatcgatgctgccaagcgtgcttcagcacactctgtaatcgcagttattccttatttcggttgggcacgtcaggatagaaaagataaaccgcgtgtttctatcggggccaaactgatcgcagacatgctgagtactgccggtatcgaccgcttgattacgatggacctgcatgccgatcagattcagggattctttaatgttccggtcgaccacttgtatgcttcttccattttcctggattacatcaaaacatcattgcctctggataacctgtgtatcgctacaccggatgttggaggaactaaacgtgccagcagttattccaaatacctgggtttgccgatggttatttgccacaagtcacgtctgcgtgccaatgaagtggccgaaatgcgtatcatcggtgatgtgaaaggtttggatgtacttttgatcgacgatatggtggatacggccggtactattacgaaggctgccaacctgatgctcgaaaacggtgctaaatccgtgcgtgccatcgccagtcatgccgttatgtccgacccggcttctacacgtgtagaccagtctgctttgactgaaatgatctttacggattctatcccttatgcaaagaaatgcgaaaaggtgaaagtgttgtctgttgccgatatgtttgccgaagccatccgtcgtgtttgtagcggtgaatctatcagttctctgtatactatttaattaatgcatatatcaaggaaaggctgcaatcctgcgggatgagcagcctttttatttccatataattcttaactttgtctgcatgaaaaagagcgagaaccttctcgcttgatatgattaagatgaattattggtttaatctataggtcagaatggatcagcatgcgtaccggtatcggtaaaaaggagtataagctctgtttcgttttggctccagactaataaccggtctgattatataatggcactcccatagaccgtcatacttatgtttttaccgtttcttttttacttgttgcctccatctttacttaatttgaatattacggccaaaaataataattagcaatttgcctatttctcttcatcaataatcatgccactgccgaggcaaagacgatggtctttgtcgtagactactccgtactgtccgggggcgattccttggattttgttgtcggattcgatgcggtataagtctccgatgcgacggatgcggccgtgtgtgaagtccggtgtgtgacggatcttgaaagtgatctctttctcgtccgcaaattctccccatgggtcttcggtgataaagtcgaagccgtgcatgttgataatcttgccgtactgtgtttccggatcataaccgttggaaacatagataatgttccgcttgatgtcctttttgataacgaaccacggtcctccgctcaagcctaaacccttacgctgtccgatggtgtggaaccagtagccgttgtgtttgcctaacaccttgcctgtttccagttcgacgatctttccggttcgtttgcccaggtagcgttcgatgaaatcattatagttgatcttgcctaagaagcagattccctggctgtctttccgtttggcactcggcagtttttgttgttcggctatagctcggacttcgcttttcatgagatgtccgatcgggaacattaatttctgtatttgcaaacgagtgatttggccgaggaagtcggtctgatcttttaccggatccttggcggtggaaagccatactttaccgtctatctcggttgtcgtggcgtaatgaccggtcgctattttatcgaaatcctttccccatttctcttcgaagcagccgaatttgatatatttattgcacatcatatccgggttgggggtgagtccgcgttttacggaatcaatggtgtagctcacgacacgatcccaatattcgtcgtgcaaggagacgatttcaaaccggcaaccgtacttcttggcgatataagaggtgatttcaatatcttcttcggcagggcagtctatatatccgtctttatcttccatgccgatacggatatagaaaatggtaggatcgtatcctgcctctttcaactggtggacgactacggagctatctactcctcccgaaactaatgctgcgatttccatatttttacagtgaataagaattgtacaaaggtacggtaaatttttcaattaaaacaggagagatactttgggtgcatcgattaccgataagatacatgtcggaacgacgaaaaattattggcagtatctttcggaaatgttgggtttggaactgctcgattacggtattatatctagccggacgaatcttattctaactgaagggatagtagtgacgatttgatagaattgaaagagcgattcttgttgggatacttttaacctgcaaaacatttttcatctcatcggaattgcttattttcgcatccataatagttctcttttatgaatgtagacataacagatttaaagacggtccgtttgagtcaggacgggagtgctgtgattatcttggaccagacctgcttgccgggatctgaagtctatgtttccctttcttctgcagaagagatttgggaggctatatatagattaaaggtgcgcggggcgccggctatcgggatagctgctgcctatggcatttatgtttgtagccgacagattgcggcaaacacttatggtggtttttgcagtgagtttctccgaatcaaggattatctggcatcttctcgccctactgcggtcaacttggttgcggctttggaccggatggaaaaagttgtggtcgcccattctgtgaatcctgttccggaaatagtggaactgttgcgtgtcgaggcggaggcgatccgggcggaagatgcggctgcttgccgtaagataggagagaactgcttgtccttgttgcgcccgggaatgggaatcctgacacattgcaatgccggtcatttggcggtatcggaatatggaacggctctcgctccggtttatttaggagaagaacgtggatatggctttaaggtgtttgccgatgaaacgcgtccgctgttgcagggtgcacgcctgacggcctacgaattgcagaaggtgggtgtggatgttaccttgatttgtgataatatggcgtcgaccgtcatgcggaaaggctgggtacaggctgtcgtggtcggttgcgaccgggtcgcggcaaatggcgatacggctaataagatcgggacttcgggagtggcgatcctggctcgttattacggtattcctttttatgtgttaggtccgacatccactattgatttgaattgtccggatggggattcgatcgtgatagaagaacggaatcccaaggaaattacggatatgtggtatgcttcgcggatggctcctgaaggggtgaaagcttataatccggcttttgatgtaactcctcacgacttgataactgcgattataaccgaaaaaggtattgcttatcctcctttccgtctggaggatttctgaaaaatatttacggaaagttttgctaatcccgaaacaatcagtaattttgctgcccaatttgtggatatagtaattaaacaatataataaattaaattatgatcgtagttccattaaaagaaggcgaaaacattgaaaaagcgctgaagaaattcaaaagaaagttcgaaaaaacaggtgtagtaaaagaattgagaaaccgtcaggctttcgaaaaaccctctgtagcgaagagaaaacaaactatgcgtgctgtttacgttcagcaattacagcaggtagaagaataaaaatacaaaatctatctgccaggcttgttttattggattcttattcttattttcgttgcataaaagttgatgcaacgtgaatgtgctgattgattcatttttagattatcttcggtatgagcggaattattccgaatatacgattaatgcttatttcaaagatttacagcagtttgaagattttgtaaaagagaagaaggaaggcatatttgtgccgggggaagttgatacggatattgtacggaattggattatatctttgttggataataagatttcgcccgtatctgtcaatcggaaattgagttctttgaaatctttttttaaattccttatgaagcagggattcgtttctgtaaacccgttacggtttgtgaccggtccgaaaacaaagaagccgttacctacttttgtaaaagagaaggatatggaagagttgttggatggagacgggtttgatgaggattttgaaggggtgagggatcgtctgatacttgaaatgctgtatgataccggggtgagacgttcggagctggtcggtttacaagataccgatatagactacgatgctatgctgatcagggtgacaggtaagcgtaacaagcagcggctgattccttttgcagaaagattaaaaaacttgatgcttgcatacactgaagtccgaaatcgtgaagttgacgcaggatgcggatggttctttgtccggaagaatggagaacaattgtctacgggtattctttatacgatagtaaaaaagaagctttcggacattccgacattggcaaaatgcagtccccacgtattaagacattcgtttgcaacaagtatgttgaataatggagcggagttgaacgccgtgaaagagttactcggtcatagcagtctggcttctaccagtatttacacacatacaacctttgaggaattaaaaaaagtgtatcatgctcatccaagagcacaaaaagaaggaggtttattatgaacattagaattcaagcaatccattttgatgcaactgatcaattagaagcgtttattcagaagaaagtggctaagttggaacagtatttcgacggcattatatcggcagaagttagtttaaaggttgtaaaaccagaatctgcaaagaataaagaagctgctattcggttgattattaaaaatggagattgttttgccgaaaaggtaaatgatacctttgaagaatcaattgacgaatgcgtagaagcattggagaaacagttagttaaattcaaggaaaaaatcagagccaaataaaaaaaacggtagataaatttggtatataagaaataatgcctaaatttgcagccgtttcgccttggtgacgaaacggctgctttttgaagcaggtatgcctctttagctcagttggccagagcacgtgatttgtaatctcggggtcgttggttcgaatccgacaagaggctcaaaatagttgatagtggaaagttgacagttgacagttgacagtttatgtcactttccagttttatttgtcaactatcaattttcaactgtcaacttattgggcagttaccagagtggccaaatggggctgactgtaactcagctgtctttcgacttcggtggttcgaatccatcactgcccacaaaataaaacaatttataaaagaattggtttatttgaaattgcggaagtagctcagttgatagagcattagccttccaagctgagggtcgcgggtttgagtcccgtcttccgctcttatttttgcctgtgtagctcagcggtagagcacttccttggtaaggaagaggtcccgagttcaagtctcggcaccggctcaaaatggtattttagaacatgatcattaatcaaataaagaacaattaagttatggcaaaagagaaatttgacagatcgaaaccacatgtgaacattggtacgattggtcacgttgaccacggtaaaacaactttgacagctgctatcacaacagtattggcaaagaaaggtctttcagaattgcgttcattcgactcaatcgacaacgctcctgaagaaaaagaaagaggtatcactatcaacacttctcacgtagagtattcgactgcaaaccgtcactatgctcacgtagactgtccgggtcacgccgactacgtaaagaacatggtaactggtgctgctcagatggacggtgctatcatcgtagttgctgctactgatggtcctatgcctcagactcgcgagcacatcttgttggctcgtcaggtaaacgttccgagattggttgttttcatgaacaaatgtgacatggtggacgacgaagaaatgttggaactggttgaaatggaaatgagagaacttctttcattctatgatttcgatggtgataacactccgatcattcgtggttctgctctgggtgctttgaatggtgatccgaaatgggaagaaaaagtaatggaactgatggaagcttgcgatacttggattccgctgcctccgcgtgaagttgacaagcctttcttgatgcctatcgaagacgtattctctattactggtcgtggtacagttgctactggtcgtatcgaaactggtattgtaaaagttggtgatgaagttcagatcatcggtttgggtgctgacggaaagaaatctgttgttacaggtgttgaaatgttccgtaagttactggatcagggtgaagctggtgacaacgttggtttgttgcttcgcggtatcgacaagaacgaaattaaacgtggtatggtaatctgccacccgggtcaggtaaaagaacattctcgtttcaaagctgaggtttatatcttgaagaaagaagaaggtggtcgtcacactccgttccacaacaaatatcgtcctcagttctatatccgtacattggacgtaactggtgaaatcactcttccggaaggaactgaaatggtaatgcctggtgataacgttacaattgacgttgaactgatctatccggtagcttgtaatgtaggtcttcgtttcgctatccgcgaaggtggtcgtacagtaggtgctggtcagatcacagaattagaaaactaattcaaacatataaaatgtagccagtcttttttagggctggctattttacggaactagctcagttggtagagcactggtctccaaaaccaggtgtcgggagttcgagcctctcgttccgtgctaaaaatctatagattcgatgaaaaagataattaattatattaaggaatcttataacgaacttgtttataaagtttcttggcctacgagaacagagctttccaatagtgctgtggttgttatgtttgcttcccttataattgcggcattaatctttgttattgatttaggctttgagggcgtgatgcgtttcttctacgagaaaatcttttaatcagtttaaagtatgtctgatattcaaaagaaattttatgttctgcgtgctattagtggcaaggagaataaagtcagagagtatcttgaggctgagttgaagaatactgacttaggtgagtatgtgtcacaggtcttgattcctaccgaaaagacttttacggtgcgtaatggtaagaaggtgatgaaagaacgcgcttacttgcctggatacgttttggtagaagccgctttggttggagaagtcgctcatcgattgagaaacattcctaacgtaatcggttttttgggtggatcggataatcccgttcccttgcgcccggcagaagttagtcgtattttaggtacggttgatgaattgcaggaacagcaagatgacctagatattcagttttatgttggtgagaatgtgaaaatcacttttggaccctttaatggcttcactggtgtgattgaggaggtcaatgccgagaaaaagaaacttaaagtgatggtaaaagttttcggacgtaaaacaccgcttgagttgggttatatgcaagtggagaaggaataagtgcttttgttacgaaaagtactgtctttctttaaaagttatcgatgttatatatctaaaaaattttagaaacaatggctaaagaagttgctggacaaatcaaattgcagattaaaggaggagcagcaaacccttctccccctgtaggacctgctctgggttctaagggtattaatattatggagttttgcaagcaatttaatgccagaacccaagacaaggccggtaagatattacctgttgtaatcacttactatgccgataagtctttcgactttgttgtaaaaactcctcctgttgctatccagttgttggaagcttccaaacagaagagtggttctgctgagccgaatcgtaagaagattgcagaaatctcttgggatcaggtaaaaactattgcagaggacaagttggtcgatctgaactgcttcactgtcgagtcagctatgagaatggttgccggaacagcaagaagtatgggtatcactgttaaagggacattcccgggtaataattaataaacttcaattgagatgagtaaacttacaaaaaatcaaaagttggctttgggcaagattgaagctgggaaagcgtacacattgaaagaagcttcagctttggtaaaagaaattactactactaagtttgatgcctctgtagatgttgatgttcgtttaggtgttgaccctcgtaaagctaaccaaatggtgagaggtgtggtttcactgcctcacggaacgggtaagcaggttcgggttctcgcattatgtacaccagacaaggaagctgaagctactgctgcaggtgctgactatgttggattggacgagtatattgaaaagattaaaggcggttggactgatattgacgtaattatcactatgccttctatcatgggtaagattggtgctctgggtagagtattaggtccgcgtggtttgatgcctaacccgaagagtggtacggttaccaatgaaattggaaacgcagtgaaagaagttaagcaaggtaagatcgactttaaggtagacaaatccggtattgttcacacttcaatcggtaagatttctttcaattccgatcagattcgtgacaatgctaaggaatttatttcaactcttctgaagttgaaaccgtctgcagctaaaggtacatatataaagagcatttatctttcaagtacaatgagtgcgggtattaaaattgaccccaaatcagttgaagaaaactaattaaaattattggacaatgaaaaaggaagataaaggcttaattataggtcaactgactgagatcgtaaaggaatatcctaacttttatttgactgacatcgaagcattggatgctgagaaaaccagcaaattgagacgggaatgtttcaagaaagagatcaagttggttgttgtaaagaataacttgcttaaaaaggcattggaaaatgtagaaggtgatttctcacctctgcaggttgcaatgaaaggcaatacagctgtgatgttctcacagactgctaatgctcccgctcgtctgattaaggaatttactaaagatgctaaaaaggatgctcctgttaagccggaattgaaagctgcctatgtacaggaaagtttctatatcggtgcagaaaatctcgaagccttggtaaatatcaagagcaaaaacgaacttatcggagatgttattatgttgttgcaatctccggcgaagaacgttatctctgctcttcagtcatcaggacaaactatccatggtctgttgaagactctggaagaaagataatttttttaatttacacagataaacaaacatttaaatcatacaaaaatggcagatttgaaagcttttgcagaacaattagtaaacctgaccgtaaaagaagttagcgaactggctacaatcctgaaagaagaatatggtatcgaacctgcagctgcagctgttgctgttgctggtcctgctgctggtggcgctgctgccgctgcagaagaaaaaacttcttttgacgtagtattgaaagcagctggtgcaaacaagctggctatcgttaagttagtaaaagaattaactggtcttggtttgaaagaagctaaagatatggttgacggtgctcctagcgctatcaaagaaggaatcgctaaagctgatgctgaagcattgaagaaacagttggaagaagctggagctgaagttgagcttaaatagtatttataacctggtaatcaggtgatttggttaagagtctcccttaaaggagattcttaacctttttgtgtctataatttcaataagttcaataaattccttactagatgtcttcaacagctgaaaaccaaagagttaattttgcttcgatcaaaaatcagttcccatatccggactttctcgaagtacaattgaagtcattccaagactttcttcaacttgacacacctcctgaaaagagaaaaaaggagggattgtataaggtatttgccgagaattttccgatagcagatacgcgtaacaattttgtgttggagttcttagattactatatagatccgcctcgctatacgattgacgaatgtattgctcgcgggttaacctatagtgtgcctttaaaagcgaagttaaaactgtattgtacagaccctgatcacgaggatttcgatacagtgatacaggacgtatatctgggcccgattccgtatatgacggaaaggggtactttcgtgataaatggtgcggagcgtgttgtggtttcacaattgcaccgttcaccgggtgtattctttggacaaagtacacatgccaatggtacgaagttgtattcagcgcgtatcattccttttaaaggttcctggatcgagtttgcaactgacatcaacaatgtgatgtatgcttacatcgaccgtaaaaagaaattacctgtaacaacccttttaagagctattggttttgaaagcgataaagacattctcgagatctttaatctggctgaagaagtaaaagtttcgaaagctaacctgaagaagctgatcggtcgtaaactggctgctcgtgttttgaagacttgggtggaagatttcgtagatgaagataccggtgaggttgtttctattgaacgtaatgacgttatcatcgaccgtgagtcggttctcgatagcgacaatattgaggctattctggaatctggcacgcaaaacattctattacatcgtgaggaccagaatctttcagattatgctatcatctataatacgcttcagaaagaccctagtaactctgaaaaggaagctgtcctgtatatttatcgtcagttgcgaaatgcagaacctgcagatgaagcaagtgcccgtgaagttattcagaacctgttcttctctgaaaagcgttatgatttaggtgaagttggccgttacagaattaataagaagttgaaccttactaccagcgatgatattaaggttttgacaaaagaagatataatcgagatcatcaagtatctgattgagttgatcaactcgaaagcgatcgttgatgatatcgaccatttgagcaaccgtcgtgtgcgtacagtgggcgaacagctgtacaaccagttcggtattggtttggctcgtatgtctcgtacggttcgtgaacgtatgaatgtacgcgataatgaagtgtttactccgattgacttgattaacgcgaagactatttcttctgtcgttaactcattcttcggaacgaatgctttgtctcagtttatggaccagacaaatccactggctgaaattacgcataaacgtcgtttgtctgcattgggaccgggtggtctgtctcgtgaacgtgctggatttgaggttcgtgacgtacactatacgcattatggtcgtctttgtccaattgaaactcctgagggaccgaacatcggtttgatctcttctttgtgtgtatatgctaagattaacgatcttggttttatctctactccgtaccgtaaggttgttgatggtaaggtggacttttctgaggaaggtttacaatattatactgcagaagaagaagaagaattgacgattgcccaaggaaatgctccattggatgataacggcaagtttgttcgtgatagagtgaaagctcgttttgaagctgatttcccggtcgtgcctcctacggagatcgatttgatggacgttgctccacagcagattgcttctattgcggcttctttgattccgttcttggaacatgacgatgctaaccgtgcattgatgggatctaacatgatgcgccaggctgttcctttgctgcgtacggatgctccaatcgttggtacaggtatcgaagcgcaggttgctcgtgattcacgtacccagatcatggctgaacgtgagggagaagttgtatttgtggatgcaacttgtatcaagatcaaatatgaccgctcggaagatgaagaattcgtaagtttcgaagatgcggttaagacatacaatattccgaagtggcgtaagactaaccaaagtacgactgtcgatctgcgtccgatctgtcatcgtggtcagcgtgtgaaggctggcgatatcctgacggaaggttattctactcagaatggtgagttggccttgggacgtaacgtgaaagtggcatatatgccgtggaagggttacaactatgaggatgctatcgttttgaacgaacgtatggtccgtgaagacttctttacttcagttcacgttgacgaatacattttggaggttcgtgaaacgaaacgtggtatggaagagttgacttccgatatcccgaatgtcagcgaagaagcgactaaggatttggatgaaagaggtattgtccgtgtgggtgctcgtattgaaccgggtgatattttaattggtaagattactccgaagggtgaatctgatccttctccagaggaaaaattgcttcgtgcaattttcggcgataaggctggtgatgtgaaagatgcttctttgaaagcaaccccgtctcttcgtggtgtagttattgaaactgctttattctcgaaagccatcaagaagcgtaagtccagactgacagacaaggctattcttcctaaattggatgaggaatacgaaatgaagatggctgacctgaagaacttgttggttgataaactgttggttttgactaatggtaaggtttctcagggagttaaagactatatgaatacagagattattgcgaagggagttaagttctctcgcaaggctctggaagaattggattataattctatccaagtaagtaaatggactgccgatgctgataagaacgaacttatcaagcaggtgattctgaattatttgaagaaatataaggaactggatgctgagttgagacgtaagaaatttgatcttacgatcggcgatgaactgcctactggtattgttcagatggctaaggtttacattgctaagaaacgtaagatccaggttggggataagatggccggtcgtcatggtaacaagggtattgtttccaagatcgtccgtcaggaagatatgccattccttgaagatggaactccggttgatatctgtttgaatccgctgggtgtaccttctcgtatgaacttaggacagatttttgaagctgtgttaggttgggcaggccggacgatgggggttaaatttgctactcctatctttgatggtgcaacattagatgatatgaacgaatggacggacaaagccggattaccccgttacggtaagagttacttgtatgacggtggaacaggtgaacgttttgaccagccggctacagtgggtgttacttacttcctgaagttgggtcacatggttgacgataagatgcatgctcgttcaatcggtccgtactctcttattactcagcagcctctgggtggtaaggcacagtttggtggtcagcgtttcggagagatggaagtttgggcactggaagctttcggtgctgcacatgttcttcaggaaattcttacgatcaaatctgacgacgttgttggacgttctaaggcttacgaagcaattgtgaaaggtgatccgatgccacaaccgggtatccctgaatctttgaacgtattgctgcacgagctgagaggtcttggtttaagctttactctggattaattcaaaaacaatataagtagatgagtttcggctcatctacttactcattgataactctttataaataaaaaatatggcctttagaaaagaaaacaagataaagagtaacttttcaaaaataaccatcggtctggcttcccctgaagagattcttgagaactctagtggtgaagttttaaaaccggaaacgattaattatcgtacgtacaaacctgagcgtgacggtcttttctgtgagcgtattttcggtcctatcaaggactatgaatgccattgcggtaaatacaagcgtattcgttataaaggtattgtctgcgatcgttgcggggtagaagttacagagaaaaaagtacgtcgtgaacgtatgggacacattcatttggttgtacctgttgctcatatctggtattttcgttccctgcccaataaaatcggttacttgttaggcttgccgaccaagaaactggattctattatctattacgaacgttatgtcgtgattcagccgggttgtgtagacactattgctgaattggacttgctttcggaagaagaatatttgcagattctggataacctgccaaaggaaaaccagatgttggaagatacggatccgaataagttcatcgcaaagatcggtgctgaagccatctatgatttgttggctcgtctggacttagattctttgtcttacgaattgcgccatcgtgcaagcacagacggttcgcaacagcgtaagaacgaagcattgaaacgtttacaggttgttgagtccttccgtgcatccagagggcgtaacaaaccggaatggatgatcgtgaaggttgtacctgttatccctccagaactgcgtccgttggttccgttggatggtggccgtttcgctacttccgatttgaatgatttgtatcgtcgtgttattatccgtaataaccgtctgaaacgattaatcgatattaaagctcccgaagttattttacgtaatgaaaaacgtatgcttcaggaagctgtggattctttgtttgataactctcgtaaatcgagtgctgttaagacagatgctaaccgtccgttgaagtctctctccgacagtttgaaaggtaaacaaggtcgtttccgtcagaacctgttgggtaaacgtgttgactattcggcccgttcggttatcgttgtaggtcctgaattgaagatgcatgaatgtggtctgccaaagaatatggcagccgaactttataagcctttcgtgatccgtaaattgattgaacgcggtatcgtaaaaacggttaagtctgctaagaagatcgtcgaccgtaaggagccggtggtttgggatattttggaatacgtaatgaaaggacatccggtattgctgaaccgtgcaccgacactgcaccgtttgggtattcaggcattccagccaaagttgatcgaaggtaaagctattcagttgcacccgttggcatgtacggcattcaacgccgacttcgacggtgaccagatggctgttcacttgcctttaggaaacgaggccgtattggaagcacagatgttgatgcttgcttctcataacattctgaatccggctaacggtgcacctattactgttccttcccaggatatggtgttaggtttgtactacataaccaaaatgcgcaagggaacacaaggtgaaggtcttgttttctatggaccggaagaagcaacgatcgcatataatgaaaagaaagtggatatccatgctccgatcaaagtatatgtgaacgacatagacaaggaaggtaatccggttaagaaaatggtcgaaacttctgtcgggcgtttgatggtcaatgaatttgttccggaagaagtcggttatattaatgaagtattgggtaaaaaagctctccgtgatatcatcggtaaggtgatcaaggcttgtggtgttgcccgtacggctcagttcttggatgatatcaagaatctgggttattatatggctttcaaaggtggtttgtccttcaacttggctgacgttctgatcccacctgaaaaagaggcgttggtgaaagaaggttatgacgaagttgaacagattatgaacaactataacatggggttcattaccaacaacgaacgttataaccagattattgatacttggacacatgttaacagcaagttgtccgatacattgatgaagcagttgactgctgataatgatggtttcaactctatctatatgatgatggattctggagcccgtggttctaaagaacagattcgtcagttgtccggcatgcgtggtttgatggcaaaaccgcagaaaagtggtgcagaaggtggtcagattattgaaaacccgatcctttctaactttaaagaaggtctgtctgtgttagagtattttatctctactcacggtgctcgtaaaggtttggccgatacagctttgaagactgctgatgctggttatttgactcgtcgtctggttgacgtatcgcatgatgtgatcattaatgaagaagattgtggtacgttgcgtggtttggtttgtacggaattgaagaacaatgatgaagtgatcgctagtctgggtgaacgtatcttggggcgtgtttccgttcatgatgttattcatccgctgacaggagaagtaatcgttcgggccggtgaagaaattcgtgaagatgcggctaaaaagatcgaagattctccgatcgaaagtgttgaaatccgctctgtattgacttgtgaatccaagaaaggtgtttgtgcgaaatgttatggccgtaatctggctacgaaccagatggttcagaaaggtgaggttgtgggtgttatcgcagcacagtcaatcggtgaaccgggtactcagctgacactgcgtacattccacgtcggtggtatcgcatctaacgtggcaacagaaaacagtatcacttctaaatatgacggtgttctggaaatcgaagaacttcgtgctgtggatagcgaagaaaacggtaagaaattccaggttgttgtcagccgtttggctgaactccgtattgtcgatccgacaacgaagatcgtattactggctcacaatattccttatggttccaaattgttcttcaagaatggagatacaatcaagaagggggatgttattatcgaatgggacccgttcaacgccgttatcgtatcggaagtttccggtaagatcgaattcgaaagtttggttgaaaatgttacttacaatgttgaaagtgacgaaacgaccggtttgaaagaaaagatcattatcgaatctaaagataagacaaaagctccggctgcacacatcgtggatgaaaacggaaactatctgaagaattattcattaccgttgggtgcacacgttgtaaaagacgagggagatatggttaaggcgggtgaagtcttggtcaagattccgcgtgcagtaagtaaagccggtgatattactggtggtttgcctcgtgtaacggaattgtttgaggctcgtaacccgtctaacccggctgtcgtttctgaaatcgatggtgaagttggtttcggcaagatcaagcgtggtaaccgtgaaattactgttacatccaaattgggtgaagtaaagaaatatatggtgcctctgtccaagcaactgcttgttcaggaaaatgactacattcgtgctggtatgcctctgtctgatggtgcgactactccgtctgatatcctggcaatcatgggaccgacggctgttcaggaatatatcgtaaatgaaatccaggacgtataccgtctgcagggtgtaaaaattaacgataagcatttcgaggtaatcgttcgtcagatgatgcgtaaggttgaaatcatcgatccgggagatactcgcttcttggaacagcaggtggttgataagctggaggtaatggatgaaaacgatcgtatctggggcaagaaggttgtgacggatccgggagattctcagacattgcaggcaggtcagatcgtgactgtccgtaagttgagagatgagaatagtatgctgaaacgtcgtgacttgaaattggttgaagtccgtgatgcagttcctgctacggctaaccagattcttcagggtattactcgtgccgctttgcagacaaacagctttatgtctgccgcatctttccaggaaacaactaaagtgctgaatgaagctgctatcaatggaaaagtggatcgtctggaaggtttgaaagaaaacgttatctgcggtcatttgattcctgccggtacaggccagcgtgatttcgacaaattggttgtcggtgctaaagatgagttcgaacgtatctttgcaaatcgtaagaatgtcgtagatttcaatactatggacagagacgatgagtaaaatgcggaataaataaaagagaagggttaccgatattcggtagcccttttttattttctgttatttgtttaataaaatcagagtccttatatttgtgtattatcttgataattaaaataaatcatatatgaaaaaagtactattttatttgttcacccttttgatctcgacgaatattgtttttgctgaacatcttgataatgaaatgaatgtgatgtcttttaatattcgcatgagtacaaagtctgacggggctaactggtgggagtacaggaaggacctggctgccaatgtgatcaagttttatgatgtcgatatgtttggtgcgcaagaagtcttgcataatcagttgacggatttattggaccgtttgccggactatggttatgtcggggtggggcgtgaagatggtaagacaaaaggtgaatattctcctatcctttacagaaaggatcgtttctctgttgtcaaaagtggcaatttctggctggcggaagatatgaatgccgtgggcaaaaaaggctgggatgccgcttgtgagcgtgttgcgacttgggcgatattcaaagataagaaatccggaaaagagtttttctttctgaacactcatttggatcacatgggacaggttgctcgtcatgaaggggcttctttagtattaaagcaggtgaagttgctttccagaaatctaccggtgattgttactggtgactttaatgctgttccggctgatgatccgattaaagttttaacagacgaaaaagatcctcgacatttgacacatgcccgtacattggctcctttgtgctacggacctgagtggacttttcacgattatgggcgtgttcctttggacgaacgtgtatggattgattatatctttgtaaaaggtaatgtcaaagtacttcgtcatggtgttttggctgaaagtctggataacttatatccttcagaccattgtcctgttatatcgagaataattgttcagtaaatgttatgggttccgtagatgtattaagagaaattacgccgctttcaccggaagattgttttctggtgatgcagcgacctaagcgtagtttttcctatccgcttcatgtgcatccggaatttgaactgaactatttggagaatgctgctggcgcgattcgaatcgttggtgattcggtggaggagatggaagagcttgatctgttattggttgcaggtggagccaagcatgcttattcaaatcacaaatgtctgagtacggatattttggaaataacaattcagttccatgcctctcttttcgatagttttatcaacaagcgtcatttcaagactataaaggatatgtttgagaaagcctcgtgcggtcttgtctttagccgtgaaatgattttgcgtattcaacccgaacttaaaaagctatcgagtgataaaccggattcgtttcacaatttattacgtttgatagaaatactcaagactttgtcgttagatgaaaaggcacgcaagttaaatgctatcaatactgtagaaaactttagcaatatagataatgaccgtctggatacgatcatgttgtttttgcatgaaaattatcagcgtccggttttattgtccgaacttgcttcgttaataaatatgagcgaagcgtcgcttactcggtttctgaaaaagtggacgggaaaaacttttatcgacaatttgaatgacattcgtatagctgaagcggtttgccgactgattgacacaagtgatacaatagcagaaatatgctataaatctggttttaataacttatcgaatttcaatcgggcttttaagcgacgaaaaggtaatactcctaccgaatatcgtgaaaaatatgcacgtactcgttttaggatttaaaacatgattttaaactaatttgcaaaatagatgaattatctgtgacggaatagtatcatataatgataaaatagtatttggtggttaattgtatgaggcatatctttgtaacgttgaataaacaatgaaattactaagacgaattgccttagtttaagcgtcgagattatagaatattaaacacaataaggtattttttttacattggtctaaagaattgagaattaaaaacacaactgaaaaagggctgcctgtgaaggtagccctttttatttgatactattccgattttaatatgtatatttgtcttggaatatttataatcaaataataagaatatggaaaataacaaaccgacaaatgagattcaagtagagctgtcagaagagatggctcagggaacgtatgcaaatctggcaattatatcacattcttcatccgagttcatattggattttatccgcgttgtgccgggtgctccgaaggcacaggtgaaaagtcgcgtcatcctgactccggacaatgcaaaacgactgttgtttgctttgcaagataatctggcaaagtttgaagaacaagcaaatggtaagactgccaaatttgaagattttgttcctcctatcggaggggtgaaaggggaagcctgattatcctggacagaaaataaaaaagtccgttcctaaggagcggacttttttatttgtaagtgtgtgattatccgagtctcttgtttataacgatatgaccgatataacccagaataatgactcctaaaccggtaagaagaatagtatttgacaatcctccgttaattgccggtacagccaaaatgataacaccgataaggagtacgattacccccagatttttcaataattcgttcatggtgatagatattttatatattattttttttctaccgcaaataaagcaataataacccgattgcaaaaatattttgggacaaaaatgatgaaaccattgaatttagcttttatatttgtgaaataatacagttatatatgctacggatactttatatgctctatttatggctgtttgtggttcctgtttttgtggtattgaccatactgacagcccttacggttattgttggttgcctattaggcggggaaagaatatttgcttattatccgggaatgatttggtcatggctgacttgccatttggccctttgcccggtgaaggtgaaaggacgggaaaatatagaccggaagaaatcgtacgtatttgttgccaatcatcaaggcgctttcgacatattccttatatatggttttttgggtgtaccgatcaagtgggtgatgaaagccggtattgccaaaatcccgtttgtgggagctgcttgccgggctgcaggttttatctttgtcgataattcgacaccgaaagctgccgcccgtagcgtgttggaggcggaacgtagcctgaagaacggagcgtcggtggtggtattcccggaaggttcacgtacttataacggaaagatgatccgttttaagaaaggagcttaccagatggcagccgaccagcatttacagattgtcccgatcaccttgaacggaccttttgacgtattgccgatcggttcgttgaatattcaccgtcacaagatggaaatggtcattcatccgcctatcccgaccgaagggatggatgcttcccataaaggattgcagcagatggctgacaaaacacaagacatcattgcgtcagccttatgggagcaatataaataatctatttccaggattttaaaatgccgcgcttgcagacactcagactgaacccgacgttatccccatagagtgaacctgcatctgcggccacagctcctgtgaattcccaaccttgcaggcgtggatggcgatatttgacttccacctgtccggaattgcttcttttgttatccagaaacggggcgtaaggttttccccagctattcatgagtgtgtatctgaggcgataggaaaccattggcgacaggtctccttcaaatgccaaatgccaggcacgtacacgtgtattcttgaaatctatatccccgttcgtattgtattggggggaagtcagaagcggtgatcctataccttgtccgaaataggaagaaccggttatgtattctatattgttgtaataatcatctccgccaccacccggaccttgatatttgtcatgatcgaagatgataaaatggaacggtccgctctgattgcgggtgaccaaatattccgttacaaccttttttagccagggaaggcgtggcaaatccaactgtgctccccaaagtccgtctgtcccgttcacgaatatcattccggatttatcttcgaaataatgctgatgataagctgccagtttccagttcggcatcgtatattccagtttgaaatcatacgaaccgaaatgattgccaagcacgttgacctggtccgacagagttgcattgtctccgccttcgctaccacaaactacccggataaaatctttcagggagtgaggttgtacacctattctcggattgctggatgttccaccccattgcgcccagtgttgcacgccgataataccggaaagcgggaatttgttttgcgtgtccttgatgcggacgtaaaaagatttatgatgccaaaggacgttctttatataggtttgttttccattggagaaattttccagatatttggtatcgaaagacttgcctaccgcaaaatctcctttcacctgcatccaaccctttgtgagcggaacgacggtgaattccggcatactcagttttatttccggaatcgggcgtgcgttggaggagagaaccatgtcaccggaactaagggaatgatcccaaagcgaatgccggttttctttgctccccacactcagaagcatacttttatatcctaactcggcatatatctgttggatatacacattacggtaacggggtacgacagctacaatgtccagccctgcactccagcgaaatccctttccaaaatgttgttgatgaaaaactccagcgttgagatagccgttattggcgtctaggggaactaccccgtaccgattgctcaccatccagaacggagttgtcgatccgctgctggccgatccgaaaacttcggctttatatgaggttgcatcttctgcttcttccgtttgtgcaaaagtatttgcagcatggagaagagtggcaactgcaatgattgtctgtaaggctttcattccatatttattttaaccggacaaaggtaaggattaaaacttaccggccgatatctcatttcgaaaagaagtataagcattctgaaaatacaaatatcagaataatcaatgtttattttcctggcaaccagtcgaacactgtgcgatatacatggtcgcgcgagtctttttcagagagtatcaagtcatgaatcccgttctgtatcgtgtcacgtgtaacataattgcctaatttctgtccgtatttttgaatatcgtgtatgtccagcacgatgtcggaagacagatattcgttattccattcttttgtttccgggaacgacttgtttgacgacatcaccagtaccggacagtccaggccgatccctttctgcactgttttctgcgcttcttgtatggcgtttatccatccggcttttttcggatggccgttaatcatcttccagtccgtattatatacccattcccctttgaattgtttgagcagactatgagcatacgaagcatccccgtatccttgtacggtcaggttaggaaatagtttccctatacaggaaactacagggatcacgattttttccatcatccatccgaaattccagtccagaaaggggctgttcaatatcaatccgtcgacaggaagtttaccttttttgctgtccagataatacggggtaatcaatccaccggtagaatgtgccatcagcaatattttgtcattcccctcttccctaataatggcaagggcagtatcgaggtctgcaaaatactctttcaagcttttgcagaagaaaggattctggttcggcagtatcgagcgtccgtacttgcggaggtccatagcataaaagttataaccgtgggcattcacgctgtcacccaattgtttctgaaaaaaatagtcattgtagccatgtatatacaagattgcctgtttggtctccggtaactgtggcttcttgacaagcgtgcagacgactttcccctcgtagtcatccggcatctgaatggtccggcgcagataattatcgcccagtatgtccgggacgtattgagcgtaaattgtagatatgaagagcagtgataagattgtaaaatatagttttcgtgtcatatcgtttttaatttctttattataacgcattcgtcctgatgtttgttgcagataaccgattgcaaagatatcgatttttatgaattcgtattggtcgctctacctgttttcattatcaatgacaacacgaaagtagggcctcgcaacaggtaggaatacggtttggggaatatcggcgaagatcggtgcggtaacaggtaggaaaaggtagaatatagatgccattatattttgaatatcactaattattgcttatctttacgggacgataaaacgatggggattacgatgatgaatgaattcgaagtcaggagttacggggggaggaattggcggtcctttacggttctgatttgatgtcggtatcagcagggaaacggttgtccaaatgggtaggggtaaacccggagctaaagacagagccacagggaaacgattggaggaaagggaagaagatgtagactccccctacaggtgaggacgatcgtgcaatatccgggtgagccttgaaataagggacttctgtgtacgaaacaagggactttggcgtgtcaaaccaagaagttcgggaggtaaaagaccggacttccggatgcgaaagaagggatttttctcatacctgtcgtgtctatgccggtttaaaggggtacaaggaaatgagcctatatatatattattaatatatttattttaagatgtaggattgaaccacaatgaacggaaaacctctgtaagctacttgtaatgagttgtttatattgagccattgactgcaccttttttattagaggtgaactgtttggtttagagcctgtttaaattatattcaataataatcttatagtaggcaatttaatcatttcctctgccggataaaacgttaattcatggcttcggcagagttttctattctgatttgctactgagcttactaggataaacataattgaggttgctctgaaaagataaaagtttttgtttgcagaataaaaaaaagttcctacctttgcaccgcaaaaaatatttagtaataacaatacaaaacagcgttttatgaacaattacgaaaccgttttcattttgactcccgttttgtctgacgctcagatgaaggaagcggtagaaaaattcacgaaccttctgaaagaacagggtgctgaaatcgtgaacgaagaaaattggggtttgcgcaaattagcttatcctatcgacaagaaaacaacaggcttctaccagttggttgaattcaaggcaaatccggaaacaatcgctacactggaaattaacttccgtcgtgacgaacgtgtgattcgcttcctgactttccgccaggacaaatatgcagcagaatatgcagcaaagagaagaagtttgaaatcatctaaagaaacagtaaaggagaattaatcatggcagcaactcaatcagaaatcagatatttgactccgccttcagtagacgttaaaaagaaaaaatattgccgttttaaaaagaatggcatcaagtatatcgattacaaagatcctgaattcttgaagaaattcctgaacgaacagggtaagattcttccgcgtcgtatcactggtacttctttgaaattccagcgtcgtgtcgctcaggctgttaaaagagctcgtcatttggcgttgcttccttacgtaaccgatttaatgaaataataaaagagaggagacagaatatgcaagttattttgaaagaagacgtaatcaacttaggttacaaggacgatatcgtaacggttaaagacggttacggacgtaactttctaatccccacgggtaaagcagttatcgcatctgagtctgcaaagaaagtattggctgaaaacttgaaacaacgtgctcacaagttggctaagattaaagaggatgctcaggctttggctgctaagttggaaggcgttgccctgacaatcggtgctaagacaagctctacaggtacgatcttcggttctgtaacgaatatccaagtggctgatgcattggcaaaagccggtttcgaggtagaccgtaagattatctatatcaaggaatctgttaaggaagttggcaattacaaagctaccttgaaacttcacaaagaagtatcggtagaagttccttttgaagtagtttctgaataatcctataccggatctataaatggaaagggcgattccttgcgaattgccctttttttatttcagatcagcccagtttaactcatcaaaaaacattacatttgtcccgaatttgcaagaaatttttaaagtggtaaaaagaacttttctatatatcaatttggtgatagccttgttttttgttttacctgtgtcgcaggcaaaggaaaagacgtttacggtggtgatcgatgccgggcatggggggaaagaccctggtgcgcgtggttcgtccatcaatgaaaaggctattaatctggcggtagctcttaggctcggtagcctgatatcggaaaagcatgatgatgtgaaagtcatttatacacgcaaaacggatgtcttcatcgaattggacgagagagcgaatatcgccaaccggaataaggcggacctgtttatctccattcatacgaatgcggtgaagagaggcagttccgtatcgggaacggagacttatacattaggtttggcccgtacggatgagaatctggaagtcgctatgcgcgaaaactcagcaatccttttggaagataattatctgcagaagtatgaaggtttcgatccgacttcttccgaatcgtatattattttcgaatttatgcagaataagcatatggagcagagcattagcctggcttcggaggtgcagaaatgttttgcttcggccaagcgtaataacaggggagtgcggcaggcgggtttccttgtgctgcgtaagacgagcatgccgagtattcttgtggaattagggtatatctcgaatcctgcggaagaacgcttcatgagaacgaaggaagggcaaaacaaactggcaaccgccatttataatgcttttacaaaatataagtgggagtatgaccgcaagcgcggtgcgttggcgggaaatgcaagtgctgctcctatattggaagttgtagataatattgatgataatcaaccgatttctgcgcctcctggaagcgaagagtatattcgccaaaagaacaagatggaggagtccaaccagagtcgcgtatccaagtcggcagtctccgcgaagcaagcgggtcgggttaaaaaggggcaaacgatttataaaatacaaatacttacctcggataaaaaactttcttccggttctaaattgtttaaaggatataagaatgtcgattactttattgagaaaggcatttacaagtatacatacggcgagacgacaagtttcgattctatccgcaagttgcgccggcgggtagcgaaagattttaaggacgcttttatagtcgcctttaaagatggaaagaaagtgaaatattgatagtaacagaatttatatttatatatacagagaagaaatgaaaaatgtattcaccaaagaagcaaagatcggacttgtgtctatagtcagtctggcattgctatatttaggaattaattatttgaaagggatcaatctgtttaaaccgacaaatcattatgtggtggcttgtacgaatgtaaagggagtgacggtttcgagtcctgtatttgtagaaggttttaaagtcggtctggtacgtgagatagtttatgactatgatgccgtcgataagatttcgatcgatatcagcctggaagaccacatgaaaattaataaaggcagttatatcacgattgtgaacagcttcctcggtggcggtgaattgcatatccatctgaacaagtatgtggacgactatctgaagcccggtgatacgatcgaggggcggatggagtcggatatgatgcaatccgtgcaggaaaagattctcccgcaggtggaactgctcttgccgaagatcgattcgattctgggcggtttgcaaacgctggtaaatcatccggcattggcccagtctttgaataatatagagacaacgactaatagtctggctgtttcttcccgccagctcaaccagatgctgagcaaggatgtgccgggcattatgagcgatctgaaggtcatcaccggaaactttgccgatgtcagcacggatttgaaaaaactggatctggcaacgaccgtgaatgcggtgaatgcaacattggataacgtggaacagatgacgcgtaagctgaactcaaaggataatagtatgggactcctgttgaacgaccgtgctctttacgataacctgaacagtacggcagacaatgcctccaagcttttgctcgatttgaggcagaaccccaaaagatatgtacatttttctgtattttaagattgcataagatttgttgtacaaatctgtttatttagaattattccaattaaacgaaaaaatataaaatacagaagtttgacttctctaaggcctttagattgagaagtataactggatcgaaaggccttttttgaagtcggttgccagagatagcaaggagctaaagagtgctcttaaacaaaggttttttgtgattctgatattttaaaatgaagatattcaggttgttggaattaactgcctgacaataaacgggatattgaacaatcaaaagttccaaacaaaatgatactttttttttcggaattaatttctaaactttgtagtcgtaaaaataaaaattgaagttgtaagtagagttgggagagtaaaaaatcatgcagactgaatatcaaactttgtggaataaatgcctcgcagtcattaaggacattgtccctgaggccgcttttaacacatggttcaagcctatcataccattatcatacgaggataataaatttacgattcaagtacccagccagttcttttacgagtatctggaagagaagtatgtgaacgtattgaaagttactttatatcgtgtgataggacagggtacgatattgaactatcgtatcaaagtcgttgataaggtaaaggaagatggcatgattactttacctaccggtaatgacgctccccgtaccggtaagaaaagtgcggatatcccttctctattcgagtctaaagctcgtcaggattgggattctcatttgaaccctaaatacaacttcgacaattattttgaagggacaagcaatcgtctggtccgttcttcgagcgaggctatcgcacaggaaccggggaagacctttaacccgatgtttgtattcggggcgtccggtgtgggaaagacccacttatgccatgcgatcggtaaccgcattcaggagatccatccggaaaagaaggtgctgtatatatcagcccacctttttaccgtacaatacacggaagccatccggaaaaatacgacaaatgatttcatgtatttttatcaaggcgtggatgtgctgattctggacgatatccaggaactgatcggtaaagataagacacagaatacatttttccatatattcaatcacttgcatctgctgggcaaacagttgatccttacttccgataaagctcccgtcgatttgcagggaatggaggaacgtttgattacccgtttgaaatgggggctgacggcagagctggatcgtccggatttggatttgcgcaagaaaatcctgaagaataagatcagccatgacggtgtggtgattccggatgacgtgttcaattttattgcaagcaacgtgacggagaatgtacgcgatgtggaaggtatcgttgcgtccttgctggcttattctacggcgttcaaccggatgatcgacctgccattgaccaaacaggtggtgagccgcgtcgtaaaactggaaaagaagcaggtgtctgtggaatcgattcaggatgtagtctgtaaatactataatctggaactagccgctatccagaccaactcacgcaagcgggaaatcgtgcaggcacgtcaggttacgatgtacctggcgaagaagtataccgatagttctttttctcatatcgggaagatcgtcgggaagcgtgaccatgcaaccgtcttgcatgcctgtaagacggtaagggaccagatcgaaacgaataaatctttccgttcttcggtagaagagatcgaggctttgctcaaggcttgatttgatgatatatttatatgaaaggatgcgcttccgggttgcgtcctttttctattttgagaaaatcttattgtagtgtcggttctctttttggaaaactttttgaattgaaaaaaaaggtaaactgttgataaatagcatggtcggtctgtggaagggataacttgtcgacaatgtatattttctttattgaataatttggctaatccataaacaatgcttaaacttgcacatcattaaacttaaaacaatcgtgaatcgtaaaacttacaccttcgatgaagcgtttaaagcttcactggactactttaccggtgacgaattggccgcaaaagtatgggtaaataagtatgccttgaaggatgcattcggaaatatctatgaggagtctcccgtagacatgcatcaccgcttggcaagtgaaattgcccgtgtagaaaagaagtatcctaaccctctgtcggaagaggaactctttgccctgtttgatcatttccgttacatcgtgccgcaaggaagcccgatgacgggaattggcaatgattttcaaattgcctcactctctaactgttttgtaatcggattggatggagatgccgattcatatggtgcgattattcgaattgatgaggaacaagtgcagttgatgaaacgtcgtggcggtgttggtcacgatttatcacatattcgtccgaaaggatctcctgttaagaactcggcgttgacatcgaccggattggttccttttatggaacgttactcaaattcaacccgcgaagtggcccaggacggccgtcgtggtgccttgatgcttagtgtttccatcaaacatccggattcggaatcgtttatcgatgccaagatgacggaagggaaggtgacgggggctaacgtttctgtgaagatcgatgatgaatttatgcaggccgtaatcaacggaactccttataaacaacaatatccgatcgactcgtcggaacctaccaatgtgaaggaaatcaatgcggccgaactttggaagaaaatcattcataatgcatggaagtcggctgaacccggtgtgcttttctgggatacgatcttgagagagtctgttcccgattcgtatgcggatctcggattccgtacggtttcgaccaacccttgcggtgagatccccttgtgcccgtatgatagctgccgtctgttggcaatcaacttatattcatatgttgtcaatccattcacaaaagaggcttatttcgattttgacctgttccggaagcatgttatcctggcgcaacgtatcatggatgatatcatcgacttggaatcagaaaagattgaaaagattctggagaagatcgatgccgatcccgaatcattggaagtaaaacagagcgaacgccacctgtgggagaagatacagaagaagactttgcaaggacgtcgtaccggtgtgggcatcacagccgaaggcgatatgattgccgccttgggattgcgctacggcacggaagaagcgactgagtttgccgagaaggtacagaagatgttggctttggcagcctatcgttcttctgtggaaatggccaaagaacgtggtgcattcgatatctatgatgcaaagcgcgaagaaaagaatccgtttatcaaccgtctgcgtgaagccgatccggagctgtatgacgacatggtgaaatacggtcgccgtaatatcgcctgtctgacgatagcaccgacgggaacgaccagcttgatgacgcagactacttcgggtatcgaaccggtgttcctgcccgtttatcgccgtcgccgcaaggtgaacccgaacgatgcggaagctcgtgttgactttgtcgacgaaacaggtgacgcattcgaagaatatatcgtattccatcataaatttgtaacctggatgttggccaacggcttctctgcttccaaaaaatatacacaagaagaagtagaagaactggttgctaagtctccttactataaagcgacgtcaaacgatgtcgactggttgcagaaagtccgtatgcagggacgtattcagaaatgggtggaccactccatcagcgtaacaatcaacctgccggccgatgtgacggaagaccttgtgaactccctgtatgtggaagcctggaagtgcggttgtaagggctgtacggtttaccgtgacggttcccgctcaggtgtattgttgtctacggataacaagaagaagaaaaaagaagattgcaactgtatggagccgccggttatcgtggctacccgtccgcgcgaactggaagccgacgtggtgaaattccagaacaaccgtgagaagtggattgcatttgtcggtctgctgaatggtcgcccgtacgaaatctttaccggtcttgccgatgacgatgaaggtatcatgttgccgaagaacgtttcgaagggtagcattatcaagagctatgacgaggacggccagaagcattacgacttccagttcaagaataagcgtggttacaagatgacgatcgaaggtctggacggcaagttcaatccggaattctggaactatgccaagctgatctccggtgtcttgcgctacggtatgccgatcgaccaggtgatcaagctggttcaaggtatggaactgaataacgaatctatcaacacttggaagaacggtgtggaacgcgctttgaagaaatacctgccgaacggtacggaggcaaaaggccagaaatgcccgaattgcggacatgagacacttgtctaccaggaaggttgtctgatctgtaccaattgcggtgcttcgagatgcggatgaaaagatttatggtttatgatttatgatttatcattgacgctaaatgataaatcataaatcgtgaataatatcccatgaatcataaatcataaatataaaagtaccatgaaagtcacctttaatatcaacttccataccgtttgggggcagaagttatgtgttgtagggtcgattcctgagctgggttcctgggaacctgctttggcaaaagaaatgagttataagggagatggaaactggcagcttgaactggaagtgacctctcctgtcaaggatatagaatacagatatttcctgagtgtaaacgacaagcagatattcgaggaatgggaaaagaaccatcaggtattctttatcggccaggcagaccaatatacactatatgattattggcaggttcgtcctgctaatctggccttttattcctcagcatttactaaaagtttgtttgcacatccgtgtaatacgcatgagcgggtggtgaagagcggtaagagacttacgatcaagatctctgtcccgcgtgtcgaaaagaaccagcgcgtggctatcaccggaaatcaggactgtttgggcaattggcatcctgataaagcgttaatattgagttgcgacacctttcccgtctggcatatagacttggatgcgggagagatttcctatccgttggaatataagtttctgatctgcgatgatcagcagcagcctttatattgggaagaagatgagaaccgtgtcttgaatctgccttcgcaacaggtgggagagacggtgatcgtttcgggcctttattttcgtgataacctgcctttatggcggtgtgctggttcggtgatcccggtcttttccttacgttcggagaagagcttcggagtcggtgacctaggggatttgcgtatgttggtggattgggccaggaaaacgtgtcaacgtatcatccaggtgcttcctatgaacgatacgacgacgacgcatacccgtaccgattcgtatccttatagcgccatttcgatttacgcccttcatccgatgtacatcagcctgcccgatctgggagagctggcagatccggaaaaggcggccttttttgcccggaaacaggcagagttgaacggactggatgccgtcgattacgaacagacggttcgatataagctggaatattgccgggaatacttcaggcaggagggcgaggcgatcttgtccacctctgaatatcgggagtttttcgcgcaaaacgagtcctggctgatgccttatgccgcctattgctacttgcgtgacatgtaccggacttccgacttcacgcaatggaaagagaactccgtattcgataagaacactattcgtgaactttgttccgtgggaggcaaggcatatccggaaatatctttcttgtatttcctgcaatatgtcctgcatacccagtttaagggtgtttccgattatgcccgcaagaacgggatcgtgctgaaaggcgatttgcctataggagtgaaccgtacgagtgtcgaggcatggatggaaccgaaatactttaatatgaacggtcaggccggtgctccgcccgacgatttctccgtaaatggtcagaactgggggttcccgacctataattgggatatgatggagaaagataatttctcctggtggaagaaacgtttccgtaaattggaagattatttcgatagtttccgtatcgatcatatcttaggctttttccgtatctgggaagtaccgtcggagtatgttcagggactttgcgggcatttcaaccctgctttgccgcttaccccgaacgaaatcgaacagtatggcttggatttcaatgaagcgcgcctgactacccctcatatcaaccgcgagttcctgcccgaattgtttggcgatcagacggaagaagtgatcggtgcgttcctggcccagtcatcatcgcggcatttcgtgttgaaacctttctgcgatacgcaacgcaaggtggaagctctgtttgccggaaagacggatgaggcatcccttcggattaagaaaggactgtttgccatagccaatgaagtgctgttcctgcgcgatccgcgtgagccggataaattccacccgcgcatttcggctagccagtcctacttgtatcgcgagttgagcgcttctgaccaatatgcttttgaccagttatattggaactttttctatcaccgccataacgagttctggaaagcgcaagcctttaaccgcctgactccgctggtaggcagtacgaacatgttggtttgtggcgaagacttaggaatgatcccggaatccgtccccgatgtgatgaacaaattgcagatattcagtctggaaatagaacgtatgcccaagactccgcaacgtgaattttcggacttgtacaacctgccttatcattcggtttgtacgacatccacccacgatatgacaccgctccgtagctggtggaaagaggaccgtgctaagatacagcgttattataataatgttctgggatatgccggggatgcgccagaggaatgtacggcagatttggcgacgcagatcgtttccaatcacctggcgacggcttcgatgctggctataatccctatacaggactggtttgcaatggatgactccatcaagcggaaagattacgaagcggaacgcatcaacgtcccgtccgattcaaaccattattggcgatacaggatgcacatcacgttggagaaactgatcgaggcagactgcctgaataacaagattacggaactgattaggaattcggggagaaaataaacagccagtcggttctacagtcgcggaggagcacgctattttttcagaaaataagtaaatagagtgttcctccgttatttttttatatatttgcttcattgtaagttataacagtaggtttaaacgaaaaagtatccgtggctcccttcatatgaagggaaggtgtgtcaaaattctcaccttcttttttatgcccaaagccccgactttcacaagctggggctttgttataacctgaagattttgtatctttaggcataagaatttatactatggcaaagatacattttcgtccttacaatcccaaccaaacagtgctttttcctcaaagaatagatgaggatattgcagataacgatccggtgcgcatggttgacgccctggttgagggcctgaatcttgaaagtttcaggaagctatataaggaatgcggccgcagcccttaccatcccaagatgatgctcaaggtcattctgtatgcctacatgaacaacgtctactcctgccggaaaatcgaaaagctccttcatcgtgacattcattatatctggcttgccggatatgagaaaccggatttcattaccatcaaccgtttccgcaatcgggtgaagaaggaaatcaacgaggtgtttacccaaaccgtactccttctctcttccaaaggcttcatcagcctgaacgtggaatacattgacgggacaaagattgaatccaaagccaacaagtatactttcgtttggcgaaaaacggttgagcggaaccgagagcgcctgatgaagaagatacatgtcctgctagggcagatagacgatgtcatcgcccaagaaaagtcttcggaaagtaatgaggaggttgagttcactccggccatgctgaccgaaatggcgggagaattacgtcatgtgctggaacaggttcccgagccttccaccaaggaggaaaagactgagctgaaaaagagacgcaaacagctgaaggagctggaagaacatagggacaaactccaggaatacgacagtcatctggacacgctgcaagagaggaattcctattccaagacggacaaggacgcaactttcatgagaatgaaggaggatgccatgcgtaacgggcagacgaagcccggttacaaccttcagatcggcaccgagaaccagttcatcaccgattttgcactcttcccgaaccctacggatacactgaccatgatccctttcctgcaatctttttcaaacaggtatgaccggatggctcatacggtggttgccgattccggctatggttccgaggagaactaccgcttcatgtcagagaacggcatggaagcttacgtcaaatataactatttccacatggagcagcggccgagattcaaaccggatccgttcaaggcagaaaacttctactacaatgaagaacatgacttttgcatctgccctatgggacaaaggatgcggaggataggtactagacatgtgaaaaccgcatccggatatgtcagcgaaaatgccaggtacagagccgtcagatgtgaaggctgtccgctaagatgccgttgttttaaagcaaaaggaaacaggacgatagaactgaatcacaggctcagaaaatacaggcaaaaagccaaagagcagctctgctccgaggaagggctgaaacacagaggacagagatgcatagaaccggaagccgtgttcggacaaatgaaaaacaatatgaactacaaacgtttccgccattttggaaaggacaaggtcttcatggacttttccttctttgccattgccttcaatataaaaaagatatgtgcaaaaatggctaaagaaggtatggattggctgactggactgttttatgagcttacagtagctatatttagatgctgcgaacacataaatcaaagaaatcctcaaaatatcgcagcttaaaaaaatgagccgatttttatagtcaacgaaaaaaaagaaggcgcatcgggtattacgacacaccttcattccttattataaaatatacaatgggtacgaactgaagattactaatttaaactttataatatatgatgaacaaactttacttttattgtcttgccctatttgtggcaccgactttttcagccttcgggcaaactcaaccctcgcaggacgagaatgggtattatttaatagagagtgcggaacatctgaaatggttccgggatcaggtgaatgcttccgagcacgaacaagtggacaccaacggtgacggtcaaatcaacatggacgacgatacggttgtccggcttaatgccaaactgacggccgacatcgatctcggtggcgaatcttggacgccgatcggtgagtataacaacggcgaggagcctgatgaagtccgtttcggaggctacttcgacgggcagggacatgtcatcaagggactgaacgtccagccgatcgacgggcggcagtcgtacgggctgttcggctatgtcgcttggggtgtggtgaagaacctcggcatagtcggcggtacggtcacttccaaagccgatgatgggcaggaatacaccggtgccatcagcgggatgctcagctacggacgtattgagaactgcttcagcactgccactgtcagcgggacggcagagggaagcattggcggattgaccggcggtatgcgcaagatcagcagcgtttcgaacagctacaatgccgggacggtcatcaatccggcaggtatggcaggtggcattaccggatacataggcagcgatgcgagcgtctataactgttacaatatgggcaaggtgaccggtggcgcgatttcgggtgatgactacagcgaaagcaccctccgctcaggtgaggaagaactgccctccatcattgactgctattatctggaaggtgctggctccggcacgcttgccaaggcactttcggcttccgatttcgtgaccaccatcaatgaaaagctcttcaccgatccgaataacggtgaggatttcccctgggacggcaaggcgaaccttacaggcgataggttgtctgttccgacattcgacagcagttctgtcgtggaagttcctctcgatgatgatccgacggctacggaaaccatcgcgaagggagaaagccacatacaggcgatcgatggacgtatctgtatcacgacatccgaaccgatgaaagtgcgagtagtcaatattgccgggcagacggttcgtaccgtttctctatcggatggctatagcgaaatgaccggtttggctgaaggcgtctatattgtcgtcttggaagacgggacatgcgtgaaagtcttgttacggtaaggacgactgtcagatataaaacaagaagtcacagaattgaaggagaaaacgctcctccggttctgtgactttattatgaaaaaggattttgtcgttatttttcccctgacatcttgcaaaccccgttgaagcgggcgttcggttcgatctccagcgtttgagcgaatatatcgcctttgatgacggcggtcgctttcaggacaagtttggcactgacgtgtatggaaccttccacttcccctaatatttcggcatttgtggaaacgatgtttcccgtgacgttccctttcgggccgatcacgatcttgccgctacaacttacatctccttcgatttttccatccaggcggaagtctgtttccgtcacgatgtcgcctttaacggtcgtaccggcggcaagggtattatgcaggccgccattcgtgttttcttctttttgctttattcccatcatatatgtagttagttgcttatcgcaaatataagactattttttggcagaaaggtttactttatttacatttacagataaaataacgaattatgacaacaaagatagaactggagaaaatgagattctatgcctaccacggcgtaatgccgcaggagacgaaggtggggaacgatttcgttgtggatctgattcttacggctccattggagcaggctgtgaagagtgacgaattggacgatacgatcaactatgcggccgtctatgcggttgtaaaagagcagatggatatcccttccaagctgatagaacatgtggcaggacggattttgtatgctctgaaggagcgtttcccccagctggcagcagtcgagttgaaactctctaagctgaatccgcccttcggaggtgatgtccatagcgcatcgatcatccttggtgaaactttctcctgaaatcaatcttttgccgggcttagtccttcggcaaaagatttttataatttagctggtccgttatttggcgggaggggcgtatgctccgtatctttgtagcctaaagcacaaataatatattcaccatggcatttaccaacaacgtaatgattgtccgccacggattgctggcgaagttagtgaaactttggaaggaaaaccgtctgctcgaagagatagaccgtctgcctatcgagttgagtccccgtaagtcgaaagtcatcggccgttgctgtgtgcacaaggaacgggctgtgtggaagtacaagacattgccgctgctcggattcgatatgcaggacgaggtcgacgagctgacccctttgtctgaatacgccaaacaagcgttgctgcgttcggaaaacaagaaagagaacctgatgtgcgtggtggatgaagcctgttcgtcctgcgtacaggtgaactatgagattacgaacctttgccgtggctgcgtggcgcgcagttgttatatgaactgtccgaaagacgcgatccgcttcaagaagaacgggcaggcggagatcgaccatgatacctgtatcagttgcggcaaatgccaccagaactgcccctatcatgctatcgtgtatatcccgatcccttgcgaggaagtttgcccggtgaaggcgatcagcaaggacgagtacggggtggaacatatcgacgaatccaaatgtatctattgcggcaaatgcgtgaacgcctgtccttttggggcgatattcgagatatcccaggtgtttgacatcctgcaacgcctgcgcaacaaggaaccgatggtagccattgtcgccccgtccatcctggcccagtttgcggctccggtggagaaggtctacggtgccatcaagtcactgggcttccttgaagttgtggaagtggcgcagggagcgatggagacgacccgccacgaagccgaagaactgaaagaaaagttggcggaaggccaaccgtttatgacgaccagttgttgtccgtcttatattcagcttgccgagaaacatatcccggacttgaaaaaatatatttcgactaccggttcgccgatgtactacaccgcccggatcgtgaaggagaaatatccggatgccaagatcgtgttcgtcggcccgtgcgtggcgaagcggaaagaagtgaagatggacccctgtgtggattttacgctcacgttcgaagaggtcggttccgtgttggccggtatggatatcaagatcgaagaggcacaaccgttcaccgtcttgcgtaactccgtacgtgaggcacatggatttgcacaagcaggcggtgtgatcaatgcggtgaaggtctacttgaaagaagatcaggatgctagcttgaatacgatccaggtggccaaccttacgaagaagaacgtcgcattgttgcgtgcatacgctaagacaggcaaggctccgggacaatttatcgaggtgatggcctgtgaaggcggttgtgtgaccggtccgtgtgtgcatggcgaccggtctgccgggcagaaacagttgcttaaagagcttactaaatactaaacgcaaatgatgaagaagattgttttactcttttcgctggcgggagcgttattgctgacggcatgcggaccgcgggagattcctgcgaaaggagactttaccgtacgtgtgtttgacgatacgcccgtacggtttgcaccggatatctatccggaagcctataatgcgccgggggcggacagcatttaccatctggtgaacgggcgtatcatcctgaagaaaataacgttgcccgaatacgaacgcaatgtgtctgtcaaattgaaggtgacgattgcctccaacggcgaccgctgggataagtccggttcctgtttcgtcctgccgaaagagtcgggcatcaacctgctgaacatcgctaagggagaaaagcagttcccggaagtggatagtacgaagctggaacacatggtcgggatcgttgcgggcgaagattataaaccgacggtcgaactgatgcgtttcatgacacctttcggggtaggacatttcagtgcccccgacgacagtctgacgcataaccgtaagccggtctatatcgaccattgggaagatagcgtcagctgggaacaggatataaccgacctgtatccgcttttggaaggaggagcctatgttggcatctttatcgacacctggacgacggaaggctatatcgccagtatgacggtcgatgtggatgaatccggcctggcttatgatccgctgacccgccgccatgtggagccgttgatgaatacggtctactacgaggggcagacctatccggatatctttgcccgtcgggacgtgtcgacggatttcgagattcccgccggtgtgcgtaatgtccggctgaaatatatcgtgaccggtcatggcggccattccggtggtgatgaatttgtcgagaaacgcaatatcgtttcgatcgatgggaaagaagtgttgaacttcatcccctggcgttcggattgtgcctctttccgccgtttcaacccggcaacgggcgtgtggttgaaagagcgcctggcttcttatattgccaaagacggttattcggaaaagaaagtggaagaaccgttaggatcatccgacctgtcacgttccaactggtgtccgggttcggatgtgatgcctgaagagattcttttgacagatatcgcgccgggcaagcataccttcacggtcagcattcccgaagcagcagagatagacgggaacaagctgaaccattggcttgtgtctgcttatttagtatgggaaaaataatgtgccgatattttattggcacattattctattgacacattataaaaatagtattattatggattcattgttacctttttttctgttatgttttacctcgttttttacgctgacaaatccgttagggacgatgcctgtctttctgaccatgacgaatggcatgagtgaggaacagcgtcgtgccattgtccgccgcgctacaatcgtatcgttcctgacgctgatggttttcactttctccgggcagttcctgttcaagtttttcggtatttcgacaaacgggttccgtattgcgggtggcattatcatcttcacgatcggtttcgacatgttgcaggcacgctatgcgaaagccaagctgaaagaggaggaggtgaagacatatgtgaacgacatttccattacgccccttgccatcccgatgctctgcgggccgggtgcgatcgccaatgccttgatgctgatggacgatgccgtgacattggcaaagaagtgcatcttgatcgggacgatcggattgatctattttatcacctacctgatcctccgcgcttccacacgtctgaaccgttacatgggcgagacgggcaataacgtcatgatgcgcctgatgggattgattctgatggtgatcgccgtagagtgtttcgtgagtggtttcaagccgatcatgatcgacattttgcagcactcgaacctgtaaaaaagacaagggaaggcattgctttcccttgcaactccgatacagtccggtaaagagtgttgttttttgtatctacctgtttaatatgatgttatgttttaaaggaagagaaagcggacaaatgcggacagaacggacacccgatatatttattttccgagcgggggattgatcccccccaaaatggcagaataaatccttttcccttttcctttttcttttgccaagggataaatcctccggcaaaagagcagaataaattcttttcccttttccttttttccttgccaggggattaatcccctggcaaaatagatgatgataccctataggatatattttttactcaatagggcagagccctctgccctattgggaagcagatggggttatgtatggtaaatatacacttatttatgaaagccggtcttgagagagcctggaaattatggacatccgatttgcaacagacgtgcatcccaaaagtggtgttgggaatgggttttagaggttgtttgttgattattagtgttttagtaaaatgtcggaatttttatatatcgggtgtccgttctgtccgtacttgtccgtttgcctgcaaaattctctctgttcatagttccgtgaatctctttttcccctgtaaatagaacgctaagatcaggcttccttttcgcagctccggaatgccggaaagttttgttttggcgagattctcacggcggaccggttcgtaagacggttttagctcgtggaacgccttccgggcctcatacacggcacgggcgttcgggtaatggccggtcagcagaaacttggcagcggcgatatagtccagccagaaacgtgcatgcatcacgtgcttcaaatccttttccggcaagttcttatatagcatcagcaggttgtttcggaagttgaggaacgtcttgcgcggactctcgacattcagcgtggcgcctcccacgtggtacacgaccgacgatggcgtacagaccagccggtagccgcgcgaacgtagccgccagcacagatcgatttcttcctggtgggcaaagaatccggcatcgaggccgcccacctctttgtaagtggccgtacggacgaacaggcaggctcccgtggcccaaagcaggtcggcgggcgtgtcatattgtccggcatctttctcgacgacatgcaggacgcgtccgcggcaatacggatagccgtaccggtccatatatccccctgccgctccggcatactcgaaatattctttattccgttgggcgcgtatcttgggctggacgccggcaatcgttttgtcggcgtccagcgcggcgataggtgcatccagccatcccggagtgacttcgacatcgctgttgagcaagactgtgtattcgtgtccgatatgcttcaatgcctggttatatccttcggcaaagccgtaattcttgtccagccggatgatgccgaccgtcggaaactttgttttcagcatctcgatggaatcgtctgtagagccgttgtcggcaacgattacatctgcccattcgccgggtgtgcaagcgacaacggagggcaggaattcttccatcagcgcgcggccgttccagtttaggatgacgacggcaagacgtttgtccggttgaaagttgaaagttgaaagttgaaagttttcgtttgttttcatattgtgtgtgtgcttttttgtaatttaactttcaactttcaactttcaactctccactttcaactctcttatgtttccatctcttatgcgtccaaagccaccccgacggattgcgcaagatacatttttccatcaagcgggcatattgttcggtaatccagttctcaggagtctctttgggagtctcggtcaccagtttcatatctatggtatagtagccgcgtttcacctgcttcgtgtcgaggaatatgaccggcaaatccagtttgcgggcaaggcgttcggggccggtcaggatggaggaatcctggttcaggaagttcgtccagtagtgcaggttgttccggctcggtgtctggtcggcgataaagatcacgacacagcgggttttgtctttcttcagggtgatgacatcgcgcacggtgtcctgttttttgatcccgaaggaaccgaatttcgtacgcaggttaaaaaacaggcgatcgaatgcctggttgttgaggggtcggtatatctggtagatgcgggaatccttgaaacgggaagtcgagccggaaaaccattcccagttgccgtaatgtcccatcaggaggataaaacaggtgtgccctttctccatcagcgtgtctaccagttcgggatttttcaggaaagcccggcgttgtaactcttcgagggagatgtgggcgagcttgatcgtctcgaccacgtagtcggcgaagtgatggtagaactcgcgttccagccggcgcagttcggtgtccgatttatcgggaaaagaggctttcatattttgcctgacaactttcaccctgtatctgacgaccttatagaccagaacatagaggatatccgataatatataaagcgcccacatcggcaataaggcatgaacctttacccaactgtagataagcgcatattgtattttattccacatgatggttttattagtttttatttgtgtaaatgctgatttatctgttgcttttctcttgaaagaaaagtaaccaaaagttcaaggctaaaactgcttcgctactccgttcctttcgttcgctgtcgcgtctgaaactcgcttcgctcagacagcagacgctccgggcgctcactacggtttctgcgcttaacgctcaccggcttaggccggaaatagagcctgacggctcttcggggattgccgatgctacctgctcctttgcgatcccacatttgatgtgggaacaggcttgtcccccgtgcttgacacggggctgcagaagaactgtcggttaagccttgatcttttggttacttttggatcaagccaaaagtaacggataaatcatttattctataatctttactactaacgccgttttgtcctcgttccaaccttccagtatgacctgccgggtttcgttgaccaacgagtggtcgtacgggatctccaccttgatataattctccgtgaagccgtgcatcatgcctcctttgcgtgtttgttcaaacaagacattcgccttttggccgatatgcgcttcgtagaaagcatggagcttacggtcggatatgtccagcaattgctggctgcgggcatgcttggttttcgggtcgacgacgtggtcgatcttgagtgcctgcgtacccggccgttccgaatagctgaacacgtgcagctggctgatgtccaagctttcgataaaggtgcgggcctcctcgaaacaggtatccgtttcaccccgcgtaccgacgatcacatcgacgccgataaaggcgtgcggcatgacctctttgatcttttcgatcttatgccggaacagggtcgtgtcgtaacggcggcgcatcagtttcagcacctcgtcgcttccgctctgtaacggaatatgaaaatgaggagcgaaacgtctgctgcatgccacgaaatcgatcgcctcgtccgtgatcaggttcggttcgatggaggagatacggtagcgtacgatcccttccaccttgtcgagggcgcggatcaggtcgataaacgtttccccggtgctcttcccgaagtcgccgatgttgacgcctgtcagcacgatctcttttcccccgtttgaggcgacctcttcggcctgcttcaccatgctggcgatcgtcccgttgcgactgcgtccgcgggcaaaggggatcgtgcagtaggaacagaaataatcgcatccgtcctgcactttcaggaaatggcgcgtacggtcgtctgccgagcaggaaggggagaaggtacggatatctttcgtccgggaagcgattatggcgcctccctcttctctctttttcagatcgtccagatacattaacaaatccagcttctgctcggctcccaagacaaggtcgactccttcgatatgggaaacctcttccggctttaactgggcgtagcaaccggtcacgacgatgaacgcccctgggtgctgtttgccgatccggcggatcgcctggcggcatttcttgtcggcaagttctgtcacggagcaggtgttgacaacgcaaatatcggccttttcacccggacgtgctttgcgtacgccctgttcggcaaggactttccctatggtcgaagtttcggcgaaattcagcttgcatcctaaggtatagtatgcggctatcttgttctcaaaaacagtcttatcaatcattgtcttttaattatcgcgcaaatttacagaaaatgtttggagatagtatattcttatcgtttattgtggaaccggtaacctatccctaacatcaggttgttggggtctttgaatttgctcaactggtatcccacgtgcaggaacaggttgcgtgtgacagatgttttcagtgccaggatttggtacatcccttgcgtatcggtgcatttgtggtaaacattgtagcctatgcctacattgatcgtgaagatcggcatgaccagttcgccccgtacggatagcccgactgccaattgttctttgaatggcggacggtaaaacctgtgctcggcctggtcgttgtagtcggcttcgtattccttgatgttggcactttcgtcgtattgtacgtcgagcgatgctccggcacggaaatattggtggaagttatacataggattgaaattgaatcctaatacgccgaacgagccgggggcgaggtaggcttcatcgggcttgataaccccttttcgtttcgaggcgccgtataagacgatgtcgtagctgatgtgaggtttgatgcgttgtgtggtccgcctgcctgacatcaccgtcccggcatttgctccgaaggtgtgcaccaggcctatcctgcctccgacggtattgacgcctgcgttggggtactgggtgtttccgttggagaagtggctcaggtcgatgcctgccgtcagttgccatcctgccgccagttgccagttcagcaagaatcccaaattgatataggcattgatctttgaccccacaacataattataggcgttggttcccggatggtactttttccatccgaaagaggccccgaagttccattcgtaatccagtgacaggcgggaggagagccgggctatgcgtgctccctggaatgcatatactgcaaccggagtcccgatctcggccttgtcaaagaaagagtggtatgagacaccgattccctggtacgtgtgcgggtataatttcccgtagcgcgaatcgggatgaaaccggaaagagtatttcaggtgtgccgacacggacttacgcaagggttgccatgcagcgttctcgccggcaaagaactcattggtggggatgaggtagacgggacggaagtcgataccgaccccgtgtgtgagcggatggcgggagacggtgtcgttcgcccctgtctcttgtgcacatatacgagtgcatcctaacacacatattgttataagtactttccagttcttcatgtctcatccgtttattcggttgccaaagataggtaaaaatttagtttgtcaaacctttgggtattgttgtactgttggttaaactctggctatctgttgtgtatttgtcggatagtctgtatttttgcgcaaattataatacagtgtgcagtatgatacaagagaattttatcaagatatacgagaaaagtttcaagaagaactgggaactgcccgccttgacggattacagcaaagggacgaccttttctttcgccgatgtggccaaagagattgcccgtatccatatcctatttgaagaatgtcagatacggcggggagataagattgctctgatcggaaaagacagtgcccgctggtgtattgtttatatggccgctgtgacctacggagcgattatagtacctatcttgcaggacttcagtccgaacgatgtgcatcatattatcaatcactccgagtcggttttcctttttgtcagtgaccgtatctgggatacactggaagaggaaatgatcgaggacgtgcgtggtgtcttttcgctgtccgatttccgttgcctacatcagcgcgatggtgaaagcattcagaagcttttgaaaggcatggatgagaagatggcggaaaagtatccggacggtttcggcaaggatgatatcgaatatgcggaactggacaatgacaaagtggtcctgttgaactatacttccggcacgaccggtttcagtaaaggggttatgcttaccggaaacaacctggcggggaatgtgatgtacggcatcgagcttggcgtattgtacaggggggaacgcgaactctgttttctgccgttggcacatgcttatagttgtgcgttcaatttcctggttccgatggctgtcggggcgcatgtctacctgttggggaaggttccttctcccaaaatcctgttgaaagccttcgaggaggtgaaaccgaacctgatcctgacggtcccgttgatcctggagaagatttacaagaaaatgatcctgccgcagcttagcaagacgactatgaaggtggcgttgaatattccattgctggattcccgtatctatgcacagatacggaagaaactggttgatgccttcggcggacgttttcgtgaagtgatcgtgggaggagcggccatgaatgaggaggtgacgaattttctttataagatcaaattcccgttcacgatcggttatggtatgacggaatgtggaccgctgatcagctatgaccataatgacgagtatgtccccggttcatgtggccagatattgaagggcatcatgaaggtgcgtatcgactcggaagatccttataataaggtaggagaaattcaggtgagcggcgaaaatgtgatgaaaggttattataagaacgaggaagcgacttccaaggtttttacggaggacggctggttgcgtacgggtgacttggggacgatcgacgccgataaccgtatttatatccgtggtcgtagcaagacgatgatcttgggggcgagcggacagaacatttatccggaagagatcgaatcgaagctgaacaacttgccgttcgtaatggaaagcatcataatagagaagaacggtaagctggtagggcttgtttatccggattacgatacggtggacagcacgggaatttcgcatgaagatcttccgatcatcatggagcagaaccggatcgaacttaacaaacttttagcaccttacgaagctgtttccgccctgcaattgtatccgacagaattcgaaaagacgcctaagaaaagtattaagcgttacttgtatagcaactattgattagtttatatggtctgtaaatcaaattgttgaggcttgtgtataaaatattttgaaaaaaagcgcaatatgttgtacaacatatttgattaatacatacatttgcatcgttttaagacaagaagatattatagaccgtttaaattaaaaaacaaaatgaaaaagttagttgcatttgctgctgttatcgcagctgtatcattcgcctcttgtggcaacaaatcagcagaaaacactgaagttgcagaaactgaaacagaagctacagtagaagaagttgtcgctcctgctgaacaagctacaacagaagaaactgcggttgctgaaggtgattcaactgctgttgaagctccggctgctgaaactgaagctgctcctgctgaataatcatttggcaatcagtgacgaggacagtctgtatgcatgtaacatacagactttttttgtttttaaacttatgtaaattatatatatgaaacgaacactattactccttccggctattgcttgcctgagcctgtctgttttcgcacaggttcctgtagataaaactatctcgttgcagagtgttgaaatccagggaaaacgctttggaggcttgaccggtggggaagtgaaacgcctgcaggtggacagcaacctgagtggcctgacggggacgacagccgacgtattccgcctgctgccttccgttgtgaccgatatcgagggaggaatcacgttccgtggttccaataatcccggcttactgataaacggagtgccctacggcttgctggaagagtatagcggggatatgctgatccagcttccggcactgttcttcgaccgggtgtcgatgacgtcgactccttccatcgggcttgtgccggatggagatgcagggattctgaacctgtcgtctgctgtttatacggccactgattcgcctctggtcctgacgttgggagccggattccaggaacgttataatgccggtgcgatcctgaatttgcatccgggcaagtttcatattgtcggaaaatataattatcgccgggagttccgtaagcgtacgttcagcaagtcgacgacgaacaaaggggggacaaccgtcatgaacaataatgcgtccgcccgccccgatgtgcatctcgccgatctgagtgtcggatatgacctgacggcaaacgacctgatcacggtttacggtctgtataacctgatggattacagccgctacgggaagatccataacaataagctggtggacgggaatctgcaaccggtgatgttccgccaccgttataacgaccaacggcaggaagcctatgccgcagaggcgcgttggtaccataccttcgacaatccgaaggatcgtctggacgtcgtgttcaattacaataatttcgggtatgacgaagataacgaatacaagaacgagaagccggaaacaggcaagatcattgccgaggataattactatgtcaatcaggacaagaataattattacctgtctgtcctctacggaaaactctttgccgatgactggcatttgcgggtaggatacatcgggcgtttcaaggatgagagctatcacgcttacgggaacaaactggctgccggagagtggcagtccgacccgcagaaagaaaatgaatataactttaatcgccgtacgaatttgttgctggcagctttggaaaagagatggagcagtttctatgccgaagccggcgtgcaaggtgaactgaactggcaaaagatagatacgcgttatcagaccgacgatgtgcttgaaaagataccgatggttaagagcacttctcgtttccatctcttcccccgtttgaagttgggctaccggacggataaagtcggggagttggctctcagctatgtgcaacgcgtaatccggccttacggcagctacctgaatgtgttcaccgaccgtagcgacgctacgcatgtctggaaggggaatcctgatttgaaagacgagatgatccattcggtcgagttgtcttattcgtatgctacttctgctttccggttgtcaccgagcctgtattaccggaataagaagaaccgcatcatggacaaagtcctggatgaaggggaaaacggaacgatctggacaaaggagaatatcggccatagccagacattcggttttgaactgtccgcaacctggcaaccgatccgtatgctgtctctcggtttgtcaggcgatatctaccgggatgagatcgacgggcgcacgatcggttatgaccggaagaagtcgatggtctgcggcgatatcaaaggctctgtcaacatctgcatcacgccgacaacggagttgcagctcgatggcttttacatctccgaccagttgaccccgcagggaaagatcaagcaccgttccagtgtcaatgccggtatctcccaatatttcatgtaccgcaagctgcgtgccaacctgagcatcaacaacatcttcaacggcctcgaagaaacaacgatcgtcgatacgaaagacttgcaaatgacccaggtccgcaaccgtgacgcacaggtgacgtgggtgacgctgacgtataacctgtgatatttgccaggggattctttagccggggggattaatcccccggcaagagtgaagtcaatatcttcttcagcaccgtttgtgctgaaatctcgcggttggcggcttcggggatcacgatgctttgggggctttcgatcacgtcgtctgtcacgatcatattgcgacggacaggcaggcagtgcatgaagtaggcattgttggtcaacgccatcttttccgtgttgacggtccaactgcggtccgtgttgagaaccttgccgtagttgggatcggcataggctgcccagttcttggcgtagatgaagtccgcgccttcgaacgctttcttctggtcatattctacgcgagcgttgccgacgaagcgcgggtccagttcgtagccttccgggtgggtgatgacaaactcgtagtccgtcgcattcatccattcggcgaaactgttaggcacggcttgcggcagggctttcggatgtggtgcccaagtcatgacgactttcggacgggcagtcttcttatactcctcgatcgtgatcaggtcggcaaaactctgcaacggatggcgggtagccgcttccatgctgaataccggacggccggagtattggatgaactggttcaatatcttttcgttgtaatcatcatccttgctttcgaaacgggcgaatgaacgtatgccgatcacgtcgcaatagcaacccatcaccggaatagcctccaggaggtgttcgggcttgtcgccatccatgatcacgccgcgttcggtttccagtttccaggctccctggttcacgtcgagcaccatcgtgttcatacctaaattcatggcagccttctgggtggagaggcgggtacggaggctggagttgaagaatatcatcaataacgtcttgttcttgcccagcccggtaaactggtaacggtctttcttaatctcgaaagcctcggcgagtgcctgcttgaggttgcccaaatcctgtacacaagtgaagtttctcatatcatgtctcatttaaaattgttctgcctacaaagataaacaatgatttctgatttatggcaataccgttatatctgtattgttagtgtcatatgataatactaacaccgaggcagggactattttcgtatttgtccgtctccttcgatgatatacttgtaggtcgtcagttcaggcaacgccatcgggccgcgggcatgtaacttctgtgtgctgataccgatttccgctccgaaaccgaactgtgccccgtcggtgaaagccgtagatacattggcgtagacgcaggcggcatcgaccatttgctggaaacggcggatggcttctgtcgattcactgacgatgctttcgctgtgtttcgagctgtagcgggcgatatgttgcagggcttcatccaaggaggagactgtacggatcgccattttgtagtctaagaactcggtgccgaagctgtctgccgtagccggctgaagcaaagcggtagggtagtgccctgaaagagcggcaaaagcgggttcgtcggcatagataatgacgttgctaccggacagttttccacacaaataagggaggtcacctaatcggtcgcgatggacgatcagacaatccaaagcgttgcagacgctgacgcggcgtgtcttggcattgttgacgatctcgcgccctttttctttgtctccatctttgtcaaaataggtatggcagataccggctcccgtctcaatgaccggtacgcgggcatggtcgcggacgtaattgatcagtgaactgctgccccgcggaatgataaggtccaccaggccgacggcgttcaacagctcggtcgtcgcctcgcggtcgggcggcaggagtgtacagacagccggatcgacgccttgtcttgtcagtacgtcgtggataatcgccactaaggcacggttggaactgtcggcatccgaacctcctttcaacacgcaggcattcccgctcttgaaacaaagggagaaaacgtcgaaggtgacattcgggcgtgcttcgtagatgacaccgatcacgccgaagggaacggtcattttgcggatcaccatgccgttcgggcgtgttatttcgcttaacagcttcccaagaggcgacggtagcgaggcgacgttcttcatatctcctgcaatacctgcgagacgttcttccgtcagtttcaagcggtcgtatttcggatttgccgggtccatacgcgacaaatcttcgacattggcagccaagacttcggcttggcgtgtcagcaaagccgaagccgtgtctatgaggatgcggttgatggtggcatcgtccagcgtgacaagctggcgcgaagcggcgagggtatgttgcaataattcgttaatcatggtcgtatgctcgttgttgttaatccagatacaaataatcgtaatgtaccaacggttttttatcccggctgccgatcagttctcgtgcttccgtactgtcgtaacctgcgcatccgactcctaactggacgccttcctcgttgataaccttgacgatatcgtctttctcgaagtcgccgatgatccgggtgacgccgaccagcaggatactggtcgccttcggacctaacagtgcctcttcggccccccggttgatgtgtatctcgcctttggcgaagccttcggagtgggcgatccatttttttacgctgctgacaggtttgtttgacgggatgaaacgcgtgcaaacggtccggctgtctttggcgagcaggtctaccaggatgttgtccttcttgccgttggcaatgatcaccgtgatgccttcgtcggccaccttctgtgcaatgctgcatttggtaagcatgccgccacgaccgaatgacgacttgctggtttgtacatattccgacaggtcttccttgctgccgtcgatctcgcggataaccgtggaggacggatcggatgggttgccgttatatattccgtcgatattgctaaggataatcaaagcatccattcccatcatggtggcgatcagtccggaaagctcgtcattgtccgtgaacatcaattctgtaaccgatatcgtgtcgttttcgttcacgatgggaatcactttattttcgagcattacctccatacaatgtttctggttgaggtaatgcgtgcggctgccaaagttctctttcgtggtgagcacctggccacaggtcatgccatgttcgcggaacagttcgtaataccggttgatcagtttggcttgcccgactgcggaatacagctggcgggcagagacgggatccagctttttgctggcctttatctcactgcgtccagaagcgaccgcaccggaggaaataaggacgacttccacgcctttccgatgtagtttggccacctgatccaccaaggcggacattcgggtaatatccaacgtgccatccttgcgggtgagcacgttgctgcctatcttgaccgcaatacggttgaattgccaatcgatgattggcaattgaccattattttgtgtgtttcttttcattgtcggttgctcggatttcgactcggcgtattttgccgctgatcgtcttcggcagttcgtctacgaactcgacgacgcgcgggtatttgtacggagctgtcacttttttgacatggtcttgtaattctttgaccaaagcgtctccggctttatccttgtagtcctttgccagaacgatggtggcttttaccacttgtccgcggatttcgtctggaacaccagtgatggcacattctacaaccgccggatgcgtcatcagggcgctttctacttcaaacgggccgatacggtagccggaacttttgataacatcgtcggcacggcccacgaaccagaggtaaccgtcttcatcacgccaggcgacatcgcccgtgtaatacaggccgtcgtgccatgcttcgcgtgtgcgttcggcatcccggtaatattccttgaaaagaccgatcggtttgccatttgtagtgtggatcacgatctgtccctgttctccatcttcggcacgggttccgtccgggcgcaacaagtctacatcgtattgcggattagggacacccatcgatccgggtttcggttccatccacgggaaagtggcgacggtcaaggttgtttccgtctgtccgaaaccttccatcagcttgatgccggtcagtttgtagaacgtgtcgaatacggcagggtttaaggcttcgccggcaatggtacaatattggagggacgacaggtcgtattttgtcaggtcttcgcgtatcaggaaacggaagatggtaggaggtgcgcacaaagatgtgatgcggtagtcctgtatcatctgtaacatatcggccggtgtgaatttctcgtggtcgtacacgaatacggttgctccggcaatccactgtccatacagttttccccatacggctttcccccaaccggtgtcggcaatcgtcaggtggaggctgtctttatgcaagttgtgccagaaacttccggtcacgatatgccccagcgggtaggtgaaatcgtgtgctaccatcttcgggttgccggttgtaccggaagtaaaatacatcagtgaaatgtcgtcgttactgttcggatgttccggacgtacgaacggagccgcgttttcgagacctttgtggaagtcctcgaagccttcgggaatttcgggacctaccgaaacaacactctttatagagggtgaatcgggcagcgagtcgatgatatgttgggtgatcacttcctcgcccgcacagacgatcatcttgatatcggcggcattcgcacgatagacgatatctttctttgtcagcaggtgggtagccgggatcaccactgctcccaatttatgcaacgcgataatcgagaaccagaattcataacggcgtttcagtatcaacatgaccatatcaccgtggccgattcccagcgactggaaataagcggcagtctggtcggtatattttttcaggtcggcaaaggtgaagtctatgtgttccccttggtcgtttgtccagcacagcgcaatcttatcgggttcttcttccgcccatgcatctactacgtcatatccgaagttgaagttctccgggacttttatcttgaaattctttataaaatcttcctgcgactcaaaggtcgtcttgtttatgaatctttctaacatgatgattaaattgtcaatttataggattattgccaggaaactgaccttttctccatcgagtgccttcattccatgcggcagttcggagttgaaatagatactgtcgccttcttccagtatcagctctttgttgttgatctgtaataacatgcggcctttcagtaccatattatactcttgtccgggatgcgagttcagataaatcggtgtcccgtctggagccggatggacggtaaccatgaacggatctgctttccgaccgacaaacccggcggcaagcgactggtatttgtatgctttagtccgttccacggcaataccttttcctttgcgagtgataaagtagctgctcattttaggttcatcaccgaacataagcgtggtcaactcaaccccgtaagcctgtgaaatctgatgtaatacacttactgaaatatctacagtaccgctttccagcttcatatactgttcgggagtcaggttacaaaccttggccatttcttcaggcgtgatttccaatgcatcccgaagtccggccaaacgctccgcaatttgttttatctgttcgttcatctccgttgattattatatttatgatgctccaaagataggaataaaaagcaaaatgtctaaggaaagaggaatgtaatgttatttagttattttgaaaggaagtgcggaagatgtttttttgtattggctgcttcccgctgaagaagttatagtttcctgcggagagaactacagtttccagccgaggaaacaaacgtttcttccggtagaaaactgtagattgttgaataataatttattagatgctgtataagaaagcttcttaatcgtatttgatgacgctgaccgggcagctttcggcggcttcttttataccttcttcataatcgttgaagtttactccttcatttacacgtgagcggtctgtaacctgaaatacttcgggacaaatgccttcgcatgtgccgcaagcgatacaatcttcttctatccaaacactctttatagccatattttttacatttaagatgattaatatgttaagataacagctctacggcttgaattgttgatgctggacgagaatatcttggcccctttgatttaaatttaatttaacgctcctgtctcttattttagaaaattattgattatgtttacagcgctgaaataatcagtctttgaacacttaataaataagagatactatggacaacgcaatttttagtttccccaagcctattaacgagccggtaaaagcatacgctcctggttcaagtgaaaaatcatccttgaaaaaggctcttgcgcagctctcttctgaagaatgggatataccattggttatcggaggtaaagaaatccgtacaggcaataccggcaaagtcgtgatgccgcatgatcaccaccatgtattggccacttatcataaggccggagagaaagaagtgcagatggctatcgatgcagcaatgaaggcgcataaggaatggtctgaactttcttgggtagaacgtgcttccgtcatgctgcgtgtagcagaattgctttccactaaatatcgttatatattgaacgcatccgtcatgttgggacaaagcaagaatccgttccaggcggaaatcgacgctccttgcgaattgatcgacttccttcgtttcagtactttttatgccagtcaggtatatgccgaccagccttattcggaaacaggtatcctgaaccggatggaatatcgtgctttggaaggtttcgtgttttcgctcacgccgttcaactttacttccattgcctctaacttgaacatggcgcctgctatgatgggaaatgtggcagtctggaaaccgtcgacaacagctatccattctaactatttcctgatgaaagtgttccgggaagccggtttgcccgacggtgttgtcaattttattccggggcagggaagcgtgatcggcaaagtcataacggccagccgtgatttaggcggtttccatttcacaggttccacttcaacctttaacaccctttggcgtcagatcggtgagaatttaggacattataaatcttatccgaagattgtcggtgaaacaggcggcaagaacttcatctttgtccatccttctgctccggctttggaggtggcgacagctattgtgcgcggtgcgtttgagtatcaaggacagaaatgttcggctggttcacgtgcctatatccctgcttcactctggaaagaagtaaaggactatgtcggcgatatgctgaaagaaatcaaaatgggagatgtccaggatttcacgaattttgtcaatgcggttatcgatgaagcttcgttcgacaatatcatgagctatatcgattatgcaaaacagtctcctgatgcggaaatcgttttcggtggaaatggagataagtccgtaggttactttgttgaaccgactgtcatccggactacggacccgatgttcaagagcatggtggaggagatcttcggtccggttatcacgatctatgtgtatgatgataataaatatgaagaaacactcgaactctgcgaccgtacatctccgtatggtttgaccggttctatttttgcacgcgatcgttatgcgatcgatatggcattcaataaattgcgttatgccgcgggtaacttctatatcaacgacaaaccgacaggtgccgtcattgcacaacagccgtttggcggttcgcgtgcttcgggtacgaatgataaggccggagggccgttgaacttgattcgctggacaaatgcccgttgtatcaaagaggctttggttccgccgacaagctatggttatccgtttcttggagaaaagtaattaattttatcaatgagccgataaatcaggatgtgccaatatgccaatgaaagagtttctcttatgaattggtgattggcacattttgtgaaacggtattcctattcattttaatgcgttaactgtcaactaatatcaaataccatgttagattttaataataccgaaattgctttctctgccaaatcgcagtctgagctgaaaaatgcttatctgctgttcaatacgatcaaatatccgtggctggtaaagtgtgccagtgtagtaagtaatattgctttgaatattcattttccgttaggatgggcggtcaagccgactttatacaagcaatttgtcggaggtgaaactttgcagggctgtacaaaggcgatcgaccatctgcggaaattcaatgtacgctccaccttggatttttcagccgaaggagagcaaacgcccgaaggaatacaagctacttttgaggaaaccatacgttcgattgattttgcaaagggaaatgataatctggcctatgccgtattcaaaccgtccaccatcataacggacgaacttctcgctaaggtatccgaaaagcaagaggaactgaccatcgaagaagtaaaagcttaccgggagttcaaggaacgctttatggctttttgccagcgtgcctacgacaatgacgtacgcttgattgtggatgctgaagactattgttttcaggatgccatcgactctttgaccgatgaggccatgcgcaggtataataagaaacgtgcgatcgtatttgctactttgcaaatgtaccgccatgaccgtatgccgtatttacgccgtattttggacgatgcgaaagagaaaggatatattgccggtgtgaaattcgtacgtggcgcctatatggaagccgagcgtgccagggcagctgctttgggatatcccgatccgatctgtaaggataagcaggcaacggacgagaacttcgacgaggctgtccgcttcacaatggatcatctcgactgtttcgaaatgtttatggggacgcataatgaagagagcaactataaattggccaagctgatagatgaaaaaggcttaaaacgcgatgatccccgtatcttcttcgcgcaactgttaggtatgagtgacaatatttctttcaacctggctcatgaaggttataacgtaaccaaatatgtaccgtatgcaaaagtgcgggatgttttgccatacctgatccgccgtgccgaggaaaacacttcggttgccgggcaaaccagccgtgaacttcgtatgctgaaagcagaattggatcgccggaaagcggtccgtgctttttgatcggattagaactttatccgttactattctttcaagagaaaagtaacggataaatcggcatttgtggttcaaatttgtcaatactataatggattttaaaaaaacaactatcataccatcatgtttcttgtgtacaacttgaatatcatgatatatagatatgatagtttcctttttaactatcatgtaactatcataaatcagttgtttaaccatcattttagccgttttacccgaaacagatacactccaaaagtgttaaaaacggaatgttttcaggaaagcataagccttttttgccggaacacgttacttttttgtaagaaagacgttagattttttcctcaaaatgcccgtatcagggccgtttacacctccatctgagcggtcttgagatccgggtctgtggatgtctgacacccgggtctcgacaaaaaaatgtaactatattgctgaaaatatgctatatgttacatgtgaaaaagttattgtattcatgatggtatggcagttgttttcgcaatcaataacacgtttgcagaataaaaatcatcatttgcttgccttcaatccccgaatgacggaagaggtgaagccggagagttccatttcgttcaatcccttgatggtgatacctcccggagttgttaccttatcgatttccgtttcaggattgcttttgttttccaataagaggtcgacagctcctttcaccgtatggacaacgatttcctgtgcctgcttcgggtaaaaacctaattcgacaccgccttcgatggctgcgcggatatagcgcaaggcgaatgcgatcccgctggaagccaaagcggttccggcagacatcaggcgttcttcgaccaacatcgcgtttcccaattcgttgaagatattaatgattaagtccgtttgctctttggaagcattacgggctgctacgaaagtcatactgctaagcacttcgattgccgtattcggcatgatacggaaaatagtcggggttgtcaggcaatcgtcgaaccccgtgtttttggtcagataggtgttcagcagatcgaatgtgatacctgcggcaacggaaacgattatctgtttgtcatagtcgagtatgcctttgatctggtcgataatttcttctacgcgccacggttttacggcaatgacgatgatgtcggcgcctttgaccgcttctacattgtccagcgagaggacgaaatcaggattcgtattcctcattttctccagagtcgtatctgattgtgccgtgcaagtgatatccgatgctttaaacatatgaccttttgctaatcctcgtgctatggcaccgccgatatttccggcgccgataattgtgatcttcatgttttctttatattatagttattatgtctgacaaagatacagtttaaattgtcaattgtccattgcccattgtcaatttaatcgtatctttgcccttcaaaattaatctaataacataatataaatagatttacatgaaaaagacaattattgcggttggtatgctgttcgccatgacgatgtctgcaacaatccatgcacaagaatcagggaagaaggaaaatgaagaagggtttgtttttacgacagtgaaggagaatccgatcacttcgattaagaaccagaatcgcgccggaacttgttggtgttattcgacaatggcattcctggaatctgaattgcttcgtatgggaaagggtgaatatgatttatccgaaatgtttacggtttacaatacttatctggatcgtgcggatgcagctgtgcgtactcacggggacgtttctttttcacaaggcggttctttctatgacgtgatttatggaatggaggcttttggcctggttccggaagaagaaatgcgtccgggtgtgatgtatggcgatacgttgagcaaccataccgaactttccgcccttgcagatgcaatggtcgcagctgttgccaaaggcaaactgcgtaaattgcaatcagatgagaataacgccatgttgtggaaaaaagcggttgctgccgttcacgaaatttatttgggtaaggctccagagaaatttacttataaaggtaaagaatatactccgcagtctttctataagtcaaccggtttgaatccttccgactatgtgtctttgacatcttatacacatcgtccgttctatacccaattcccgatcgaagtccaggataactggcgtcatggattgtcttacaacttgcctatcgacgaattgatggaagtgttcgacaatgctatcaataccggctatacgattgcctggggttctgacgtgagcgaatccggctttacccgtgatggtgtagccgttatgcctgacaatgacaaggttcaggagttgagtggctccgatatggctcattggctgaaattgaaaccggaagaaaagaaactgaatacaaaacctcaaccacagaaatggtgcacgcaggaagaacgccagttggcttatgacaactacgaaacgactgatgaccacggtatgcagatctatggtatcgctaaagaccaggaaggtaacgaatactacatggtgaagaactcttgggggacttccaataagtatgaaggcatttggtatgcatccaaggcatttgtccgttacaagactatgaacattgttgttcacaaagatgcacttcctaaagcgatcaaagcgaaattaggaatcaaatgatttatccctattgctattccaatttacaaatcataaacagaaaagaggcctccaggaatcggagtgcctcttttctgtttatataaaagatgtgctgtgaagatgtatcgattattgtacgagctttagcgtgtaattaaggtcggaggcggctttttgtaattcctggttcagcatggtcaggctatccccttctgcctggaaataaaataccatgctgccatcacttgggatcagttcatatatgactgcgcttgcatcagcaggagttccttttttcacttggcgtttaccggtagaagtgaatgtctggtctttgccgttttcggcttccagataagtggcgtccaattcataaacgccgtcatcactatcttgctgatagaacaatgtcaggtcgtaaacgataccaggtccatcggcggcaggaatagtccctttatattttttttgtacgactgccccctttttcggatccagtttcaaggagtcgcgcatattgaccggctttgccggtttagcttttacaactggtagctccggcagagaaggagcatcgggagccgcttcggcgacggcaatactttcttcttcaactaacacgggagtgtcttttgctgcctttccgttacatgcagccaaaaatgccagtgctgctactgcgataaaatactttttcattttgtactttttatttagagatttagtgacttttggagatataacaaaagaccccctgccttttgtttttgcagagggtctttttaactatctaccgccggcgggcagatggtccagccagtatttggccatcgtcattcgtaagtgcagagttgtgccaggacgttcgtaaatgccgtggctgcgcatcggatagcttacttggctgaacatcttgccatgtttcaccagctcgtcgaccagcatctcgcagttctgatagtggacgttatcgtcgccagtaccgtgtatcaggagcaggttccctttcagtccggatgcgtatgtgataggagaaccttttcggtaaccttccggattgttttggggtgtgttcatgtaccgttcctgataaatcgtgtcgtaggtgcgttggtcggcaacgaaagcgatggcgatacccgtatggaagacgtccggataacggaacatagagttcagtgtctggcttccgccaccgctccatccagtaatgccgatacggtccgcgtcgataaacgggtaacggcgtgccatatcttggatgcctcgtgcctggtcttcggatgcgaacgtgccgacctcgccatagatgcatttacgccattcgcggccgcgcggagtgttggctcctcggttgtcgatgctgacaacgatatatccgaggttggcgacatattggttccagagatcaccaccgccccatacatcctgtacggtcgaactggccggttcgccatagacctctatgatgacggggtatttctttgtcggatcgaagttgaccggtttgatcatccaagcatccagttcgagattgccggaggtcactttgacgaactctttcgggttcagccccagcgcagcatattgttcgcgtgcctttgcattgtcctctatcatccttacagactgatgcttggggaaggaaaccatgtcgatcattgaaggggttgccgcattgctataggtatggaccgcccattttccggtaggcgacatattataacgatgctgtcccggctgtcctgccggactgagccgtttcacttctccttttccgaaaagttcggcactgtagagataacgttgggtatagttttccggtgaagcgataaaatataccagtcccttctgaagatccgtcccgaccggcgatatatagtcgaagtcgcctttcgtaaccggctgtatctccttcccgtcccggctgatgcgatagaggtggcgccatccgttgcgttcgctctcccaggtgaaccaagtattgtccttcagccattggatattgtcgttcgtgtccagccatgctgcatctgtgtcggtgaagatattttgaggtgtagggctaccgatgcgggcgatccatactttgttcgtgttctgaggacggttcatctgctggataaacagttcgttgcttccggggataaactccatacggggaatgtagttgtttcgcggatcgccgggaatctctatccaggttgtcgctcccccggctgccggaagatagcccactttgaccgccgagttcgtgctgcctgccttcggataagggaaatgcaagatggttgggtagatggaatccacattattgatgatgtcgaacacccccgttccttttgtgtcgctttgccagtaggcgatatattgtccgtccgggctccatcggaaaccgtcgcggcaggcgaattcttcttcatacacccagtcgaatgtaccgttcacgatcgtctggctcccgtcatgggtcagctgagtgatctggccggaagcgacatcttctacatatatattattgttcgaaacgaaagccacacgtgttccgtcaggcgagaattttgcaaacatcatcgatgattcgggcagtcccttccccaattggcgcaaagtcccgtctttcagagtcagtacccagtagtcacccctcgtgtcgtaacgccatacccgttttgtattgttatagattaagaccttcccgttgtcggtgctccaagagatgctgcggatggcaattggtttcccggtttctttgttgataaacatggaagagggaatgatgacttccctccggttgtctttggcgcggtaggcgacaatgtccataccgcctgtttcagcgtttggttccatccggctgtatcgctcgccatccttcatccacgtcatggcgccgattccttttgtctgtatgagccgtccgcctatgatttcttcgaggtggagtttgccctttgtggcggtcgtttcgcctttcgcaaacggatcgccgtctgtctctgtccggttttcccacggcatgattacctgtgccatgcttgcatttccggccaacaggatgcatgctaccggaataatgagtttgtttagtttcatgtatattggtttttctatgattattagtgtgcaaagaacggaatgttttataagataagcaaaggaaatgaaaaaagtaagtggatgtttttaataaattgttaaattgcagaacttttgatgaaaaaacaaaaaacggtgattatgttagaagatataaaagaaaatatgttgggagaaaagcatgaatctcttttggatgagaacaaaatgcttcgtgaattattgaagtctgcgttggatgaaaataagaaattttgtgaagatctggaattaaagcagaaagaagtggattcttacaaaaaaatgaatattgaagggaaagaagaatatggtaacttaagaaagttatatgatggagcgaaggcagaaagaaatgagtattttcgcatgtattcggagctcctcaatgaaaataaggatttgaagaagtcttatgagaattttgtgaaagcgaaaaacgctcaatatttaaggaaaagaaaaacttcatttcagaaggatgtagacactttgaacctgaagttggagaaagcaagggcgtgtatttccgatttggaagcaaagaacgagtctttttatcaagagagcattcaccttaagaagcggcttgacgtttattactccttgcatgaaggcaaaaacgatgttttcgataccgtgactggcattgtcgatgaacttgagaaagcgttccgggtcactttcgaatttaccgagccaagcctgaaaggcatggcggagttgtttaggaaagaaaaggctaaaatggaataccagtatgctaatatcgagtacgtggataaaatgtttgacaagataatgaaagcagagaagagcttaaaggaaaaagaagaaaagtttgaaacgaataaaaaaatggtagaagaactttatccccgattctactatttgataaagaataagaaattagtcttagagcagatctctaatttgaaaagatgggaggaagaactgaaagataataaaataaaggatgcctatgaaaggctgatggaacaggaattcgaatacgagcggcggaaaagtcggttgcaggagaatgaggcgttgttgaaacgtgaagagagatggttgcatagtgagctggttggaatgaacaagcagagagatgaattgataaatgaaaatatcgaaatccagcgtcaactctatgccgagatcgaaaagaacgaacaggtcctcttcatcatccgctctttgaacagcatgaaccctttatatgaaaaaataacgaaggagctggtcgcttctgttcgcggtgagaaaacccgtcacatcgttacctctttcctgaagggggaaagtatctacgagattgcacaaagagaaggtaaatccgccacttctgtacgtcggatggttcttttgtccctaatggtcaaaacgaggaaatagcttgtgcagcatttataagccagcctgttttttgtgcatttttcaaaagaaaaatgtcagatatatgaggggatgaatctcttactcgctctatctttatccccgaattacgaaaaaagaaaaataccatgagtacattactgaaccgccttaccttattagtctctttcgccttttcggctctttgcctgcaggctgccgacaagaaaccttttgggctgatgactgacctgattgaacataccgggcagacgtggcagaacggatacgcgtcgaatcttccggtctggcagctcgaagaggcgatcgaaccgttgcaatatgccgccatccgttcatcacatcccgccttttcctggatcgtaccgggcgaaaccggaggaacacgacaaaccgcttatcgcgtgatcgtggccgataaccgtgaagatgctgcttctggaagaggtaatctgtgggacagcggggtggtcgggagcgatcggtccgtagctgtccgttacgccggtgaagcattgaaaccgggtaaatcctatttctggcgggtaaagacggtgaccaataccgagggggaaagcgaatggtccgaagtgaaggcttttcgcactgctgaccgcctgtccgaatatgaaacagcctactacccacaggtgaagacgatggagtttccggtcggaataacggaaatccgtcccggtacgtgccttgtcgacttcgggaaagatgctttcgggcagttggtgctgacgttggcatccgatggtacgcgcgattcggtggtcgtgcatttaggggaatgtctcgaaggaggacgcatcctgcgtgatccgggtaaatcgacaattcgttatcaccgctatccgttggctttgttgaaggggacgaacacataccggatcaagatcaagaaagataaacggaataccggatcggctgccgtgttgatgcctgcttatgtgggagaagtcgtccctttccgctattgtgagatcgaaggctatgaggctcccctgtcaccagcctcggttgtccgcgagacggtgcattatccttttgacgagacagcttcttctttccgttgttccaacgatacgttgaatcagatctgggatctctgcaaatattctgtccgggccacttcattctccgggatttatgtagatggcgaccgcgaacgtattccttatgaggcggatgccctgatcaaccagctttgccactatggggtggatcgtgaatatgcgattgcccgtcgctcgcatgaatacctgctgcaatatccgacatggccgaccgaatggatcttgcaggcgttgtcgatagcctggtacgattatctgtatacgggcgatagccgttcgctcgaatccagttacgaattgctgaaaccgcgtatcttgatggctctccgcgagaagaacgggttgatcagcacgacgaccggattgcagacggacgatttccttcgttcgatccgttttaagggacagatacgggatatcgtggactggccgcataccggaatacttggtttgggaaagaagcaagggggagaagacgacggatttgcctttaccgattataatgtagtgacgaacgcctggcattacgcggctttgaagcagatggaaggtattgccggtgcattgggtaagcaggatgatgtcgctttttatgcatccgaatcggacgctttcaaaaaacggttcatccgttcgttctttgatgttcgcaaggggtatttcacggatggtcttgctgccgacaccgaccatgcttccctacatggcaatatgttcccgttggcgttcgatctggttccggtcggaaagaagcaaaatgtcgttgattttatccaaacccgcgggatggcttgcagcgtctatggctcgcaattcctgatggacgccctctatgaagcgaatgatgccgaatatgctttgcatatgttgaccaagacggatgaccgcagttggtataatatgatccgtgtcggctcgactatctcgcttgaagcctgggacaacaagtacaagccaaaccaagactggaaccatgcctggggagcggctcctgccaatatcatcccgcgtcgcctgatgggagtggagcctcttacgcccggtttcggcactgcccgtatcaaaccgcagcttgcttcgctcgaatgggcggaggcaacgattccgacgatccggggggcgatccgtatggaggtggagaataaggcggacgcctatattctgaaggtgacgattcctgccaatatggatgccgaagtgtatcttccgctcccgtccggcaaatacaccgtgacgaataatggtgctccggtgaaagtctcccgcgtgaagggcgagccgttcctctatgccgggaagatcggttccggcagctatacctttgtggtgaattgaccgttctgtttgtaccgtattgctttgtatgctatctttgcgccttcaaaacaataaaagactgaagtacaaatgaagagatctatttatgccgtaatcagcttgataatgatggtgatggcagtcgggtttactgcctgtggggatgatgacaacaaaggcttctctgccgaacagattgcctatttcgagaagaaccttgagttcatccgcgaaaagaaagtattgaagggagacgatggagagctgctttacaagcaaatcgttttaggcggtgacaccgccttgtatcgtgttttgggtaaggaaggagaggaaacgcaatgcccgacgagccagactcctgtaacaatgatcttgaaaggtgattttatcagcggccagaatttccagaaggagatgacgatgacgcttactcctgctggcgtcgtaccggggttgggagcaatattgttgaataatactattggcgaacgggttgaggcgattatcccagctaacttgggatatggctattatgattacagggggattcctgctggttcgaccttgatcttcacctatacgatagagaagttcaattgattggatgaagaatgtaactgctgatttatcagttattgtcctcccaaaaaatcaaagatccaccaaccgaaagctccgatggtggatcttatttatataaagaaacaattaagctgtatagcgatggttggcaaaccgtcttcttttttaagcattcagcaccttgcggaatcgtacgatgaattcctttgcctcgtccatgctcagacagagcggcggcaacagacggatcgtgttggttccggctactcccgtaaatatcttctcttcgaacagcaacttgctgcgtacttccttgatcgattcttcgaactcgataccgatcatcagaccacgtccgcgaatctctttaattcccggtagcttatgcaattcatccaacagataagctcctacttcccgcgcattgtcgatcagcttttcatcttccatgatctccagtacggcaatggcggctgcacaagctaaatgattgcctccgaaagttgtgcctaacatcccgtataccggtttgaacatcgggctgatcagcaatccgctcatagggaaaccgttgccgataccttttgctaccgaaatcaggtccggtttgattccggcatactggtgggcgaagaacttaccgctgcgtccgtatcccgactggatttcatcaagaatcaggcaggcttcatatttcgtacacaaggcgcgcagttcctgcataaaggaatcggttggcaactggatgccgcccacgccttgaataccttcgataataaccgaagaaacgtcccccttctgcaattcggcttctactgctgtcgcgtcattcagaggtagataggttacggcgagatcctcatttaccggagcgatgattttcggattgtctgtcacgcgtacggcagcagacgtacgtccgtggaaggcatgcttgaaagcaatcacacgtttctttccgttgtggaaagaggctaatttcaaagcattttcattggcttcggctcctgagttgatcaagaagagcgaatagtcgtcataaccggatgccttacccaatttgtctgccaatttctgttggagactgttgatgacggagttggaatagaatcctaacttgtttacttgttcggtgatagcctttacataagtagggtggctatggccgactgagattacggcatgtccaccatacaggtcgaggtattcgtttccctctgtatcccatacatggcatcccttgcctttgacaatctctatattgaataatggatatacgtcgaatagattcataatataaatatgttgtttataaatactgatttatttgttgcctttggatcaagccaaaagtaaccgaaagatcaagccttaaccgtccggtctactccggttctctcttttgccgtctgcttcagcagacggcaaaagagaatctgcgacataaagagcagcttagcctgtttgctcaccgataaatcatcatttgtatattaattaaaacgctgaaggcttcagatgcaaccctaccgtctcttccaagccgaagaggaggttcatgttgtggactgcttggccgctcgctcccttcagcaggttgtctatcatcgaaacgatcagcagcttgtcttcctgtttcaacagatagatcaagcacttgttcgtatttaccacttgtttcagatccgggttcttgtcggtgatgaaagtgaaagagtgatcagcgtagtattcttcataaatacgcttgatctcatccagtccgattttgcaatccagataagtcgtggcaaagatacctcgtgagaaattacctctcaccgggataaagttgaccatactgttgaagctgttctgcaattgccgtagactctgtccgatttctgccagatgctgatgcgtgaacggtttgtaaatcgagatgttatcgtttcgccagctgaaatgagaagtggacgacggtttgactccagctcctgtcgatcccgtgattgcatttacatgcaaatccgagttcagcatcagatgcttggccagtggtaaaacagctaattggatacaggtggcaaaacatccggggtttgcaatatgctgtgcgttgcagatacggcgtcggttcagttcgggcaggccgtaaacgaaatcgtgttcagggctttcgatgcggtagtccatactgagatcgatgatcttcacgttttcgggtacggtatggctctccatgaacttcttcgtatcgccgtgagcggtacagaagaaaaggaggtcgatctggtccagcggcagttcatcggtaaatatcaaatctgtttcaccatacagtccgctatgcacgtccgtgatcttgttgccggcattgctcgtactgttcacaaatgtaatctcggcgtccggatgattcagcagcaagcggatcaattcgcctgccgtatatcctgcacctccaataatcccgactttgatcatatttcttcgtccttatggttgttgtaataaacacgcagtggagtggaagtgaccttgatgaaaccttttgcatcttcggctgtccaacctttctgcatttctccgtattctccgaacttggtctttaccagatcgtcttttgaatcgacgccgacagtcgagaacgaaagcgggcgaagttccaaaatgacagtaccgttcacattgcgctgtgattcctgcaacatggcttcaatgtcgcgcataaccggttcgagatactggctttcgtggaggaacattccataccagttggcaacctggtctttccagtattgctgccatttgctaagcgtatatttttcgaggaagcgatgagcgccgataatcagcattggagcggctgcttcaaatcctacacgtcctttgatgccgatgatcgtatctcccacatgcatgtcacggccgataccgtatgcagcaccgatttcttccaccttctggatggcagcgattttgtcttcgaatactttaccgttcacggcatggatttcaccgtttttgaattcaagacgaagttcttcgctgccagtctttgtcacttgtttcaaataagcactttccggcagaccttgtgtggagtcgagaatttcgccgccgcagatggaagttccccacaaacctacattgtaggaatatttcagtttcgtgaagtctgcttcgaagccatgttctttcagatagttgatttcgtagtcgcggctcaatgccatatcgcgtgtcagcgtgatgatctcgacattcggagccagcaccaagaatgtcatgtcgaagcggatctggtcgtttccggctcctgtggaaccgtgggcgatcgcatcagcaccgatctcgtttgcatagcgggcgattgccaacgcctgaaaaatacgttccgaactgacggagatcggataagtaccgttacggagtacatttccgaagaccatatatttcaggctcttttcataatattcttttgttacgtcaattgtcacatatttagttgcccctaacttataggcgttttcttcgttttgtttcaactgttcttcgctgaaaccgcctgtgttggcacaagctgcatacacttcatatcctttttccttggccagatacataacagtaaaagatgtatccaatcctccgctaaatgcgactactacttttttcttcattttgtatacctgtattgatcttaattttttaattcttaatttttaattcttaatttccctcgcctctctctcggcccgatgaggatcgtccggatcgaagagcattccggtacagatgcagtaacggcggccggtacgttcgaggatatcgtggttgacacagccttcgcaacctctccagaaagcctcgtcgtccgtcaggtcggcaaaggtaaccggcacatatcctaattccgtattcattttcatgacggcagcacccgaagtcagactaaaaatcttggcgtgaggccagcgcatacgggccagctggaaggtcatctccttgattcttttggcaatgcccaatcctcgaaagtcgggatgcacgatcaggccggaggtggtcacatattgtttgttaccccaagactcgatatagctgaaacctgcaaatttgttaccttctaaagcaatgacggcttttccttccttcatcttttgggcaacgtattcatgtgtacgcttggcgataccggttccgcgcactttggcggcggcttcgatcgtgtcgaggatgatatctacatattcctcgtgacaggcttcagcgatcatcacatcaatttttctttcttgttccatttttatgtttgttcttttatcttctgttgttagtgggaacaaacgatcagttccctatacattatatatatattatataaaatgagccaatgcttttacgatcttgtcccggctgatcccttcgcgcgggatgatcaggatcgtgtcgtctccggcaatcgtgcccagtatttcacagggcgcatgcgtatcgatatccgaagcaatccccattgcatatcccgggcgggtcttgacaacggccagattacccgaaaactcgatgttgggatgatactgcgtttgctctttcactggttgcataagtgctgaataatcgggcaggcgatatacataatttccgtccccgtcatgtactttgatgactttcagttgctttatgtcgcgtgacagggtcgcttgggtaacctggaatccgctattttccaactgtttaagcagctcttcctgatttcctattttctctgtctgtataatgcggcagatggcatccaatcgttctttttttgtactcatacttgtatatttatgcaacaaggctgcaaatataaagagtataattgaataattatacaagtgtgccttctttttttgtataaatcttcatattctttatctcttgagcaaaaagcctttacgaattgtttattatgaagagaaatcataattttgcaaatagtataaataaaggataaaaaatgaagaagattacaagtttattcgtcgccatgttgctgttgctaagcagttgcggaagtgtcccgttgaccggaagaaagcaggttttgcttgtttcggatcaggaagtgctgtcgtccagcctgacccaatattctgattatatgaaatcggctaagaaatcatcatcgaaagacggtgccgctatggtgacacgtgttggtaaaaagatagcggccgctactgaacaatatctgagaaacaacgggttggagagcgaaatcaagaattttgcatgggagtttaacttggtgaacgatccgcaggtcaacgcgttttgcatgccggggggtaaaatcgttgtctatgaaggactgatgcagttggtttcgtcggacgatgaattggccgtcgtggtcggtcatgaagtggcgcatgccgtagccaaacacagcaacgagcgtatgagtcagcagttgatggcacaatacggtgcgcagatattggggcaggcgttaagtaataagtcggctgctgtccagaagatcggtgcttccgtttatggcttgggcgctcaatacggtgttatgttgccattctcacgcaaacacgaatccgaggcggattatatgggactggtctttatggcaatggccggctataatcccgcagtcgccgtcaacttctggcaaaaaatgtcagccggcaaatccggctccactcctgaatttatgagcacgcaccccagtgatgccacccgtattaatgagattaagcagcatttaccggagatagagaagtacagggtaaagaaatgatttgtcaccatgatatgtcttgtcctgatttagattggccatgcctccccgttttacctctatatatttaagagaaaaacaaggacactacaatattaattaatcaacaaatacacaggtattaacagcattactaccactcctttgcttttcgcccttagtcgaaaaggtttttgaccagtgtcgaaagggcttttgaccaagggcgaaaaggttttcgactaaaggcaaaaggtctgtgggctggctgtttgataacagtagcatggcaattgtcttttaaataggaccttccgaggccgactttatccctgatgaaggcaaacgcaaacggtgaagccacttttactaccaacattcatctgccaaaagtcccaataagggttattgtctgttttggtgacatgtcttatcattgtctttgtcctgaatgattagggtgggccataaaatttcttcggtataggcatgttataccgttatccccatcttcttcatcaagaagcaggcattcatattttgggctatcccttctctgagttggtaggaaaatgtcagttcgttgtcttggatatcggcctcaaaacgataattcttgatctggttcgggaattccttttcaagttcgcctaacgccagatcgtgtgtggcaatgataccgcaagcctgattcgctaccagctgtttcatcaaagcaagggaacctttttgtttgtcgatcgaattggtccctttcaggatttcatctaaaatgatgaatagctgttcgccctgttgcaagcgatcgataatcatcttcagccgtttcagttcggcaaagaaataagactcattgcttgcaagagaatcggaagtacgcaggctggtcaccatccgggccggatataaagtcagagacgccgcacaaaccggagcaccgatacagccgagcagatagttgacgccgatggtacgcaggtaagtgctttttcctgccatattcgctcccgtaataatcaggaaccagggacttttccggatctcgatgtcattctttacgcatatgtcccggcgcagtaacggatgtccgagcgctttgccttccattttgaaatatacgtctgctatctcaggataaatgtattccgggtgattgaaggcaaatccacccagcgaacagtaagcatcgaacaaagccaatgcttcgaaccaacgttccgtatcctctccatgctctatcttccatttttccagctttatcgccatgcgggtatcgcgcaaagtgaaaatattcagtatgacgccgattgcactgaaacgttggttcagcgcaccgatatgtccggagagttttttgatgattgaagaggccgtttgcccgtcgcttgcaaaccggttgtggatatcggcgagctcggcggattgaaagttttcaccttcgatacatttgatcagcttggaataagtctgcaatatttgctccattctgtccaaagaattgtgtaccgtagcgatctgcttcgcattgagataagcgataatgaaagacaatccgaagaacatgccggctatcgataccgggagcaggttcagtgcacatcctatcgcgaccaatacccagatggaagggatcagacagatgagcagtttccatattttattgttgatcaagcagggagccgctttactcaatagagaaataagttgttggtcgtccttgtttcccggatgcagaatgcctgtcacatagaaatgttgccggagctgtgtgaacgattccagttcgcggatcgcttcctggcgtcttaatatcatagccttgtcggtgagtggttgcataaaccagccggccagcttctcttttcccataaaagtaaccgtgcggttgacggactggaaaagcgaatggtttccgaacaaatccagatcaaggctgaacgaatgttctgcggaacttttttccggtgctccgtcgaacgcactgaaatcgtaatccaacccgttcagttcgtttttgcacaggttcgccagtgcttcggcgtaacatttccgggcgaagagcttggtgtgccagaccattagagcgataaacgggatagtaaacaagacggcgatcccggccagcactttccagtcttcggatttgaagaaccagaccatggcgatcagaccggcgaccaacaacaaacggatgcttccgagcaaatgaatttttttcttcaggttatcggccctgcgggtgtaagccgtgacaatatcttggtaatagttgtatatcttttccatgcctgcaaagataaataaaaatgaactaaccattctgtaattggttttatttaaaagaatgataacgaaatgaccaatataggtgctaaagaggcgaattatcattcattgattcgtatatctttgctaaggtttttatcgactcaataaacttgatgcgttttatgaaaaggatcgtgatgcttctgtttctgtctgtgatggtctgtaccctctcggcacaggaaaaaaaaggagaaactatcggggaaaggatcgtggcgaatgcttataacgccgacagtatccgcggcattttggacaagatgccgtatttcaccctgttcaaggacaattacttcgtgggagggacaactctcggacataaaccgactgccgccaattcggacgtgaagtttcagttgagtatcgcccaacgactgacaaaaagcaaattgccgttcgatacttatctgtttatccagtacactcagaaggctttttggaatgtctttcaggaatcgttgcccatgaaggatcttaattttaatcctggtatcggtctggggcatctgatcgtttaccataataaatatataggtaaagggtatcttatgctcgaacatgaatcgaacgggaaagacagcaccgcttcccgcagttggaataaagtcacttttgcggttgcgatcaccctttcgccgaattgggaggcacagttcaagacctggataccgattgtggatggtgagaataataaagacctgctgaaatataacgggatctttcaggtcgccgccaattaccggaccgacaaccgccgttttaattgtggcgtgatcctgacgaagcgtaagacttggaccagctttaacacacaggtcgaattgagttacaaatttaacaataatgagaatcaatatttcttcctgcaatattacaatggctatggggaaaatctattggaatataataagttcaaaagcatgataaggataggcttcgttatcaagccttccgatttcagcctgtattgacagaagacgataaacaaccgctctcctgtattgttatttatatatacattgtataataatgcaaaataacaaaatgaatgtaaaggaacaatactggaaatactctctggttacgattatcgtagtgctggggacgattctttttgtggaattcatcccttttctgggaggtatcttgggcgcttgtaccatttatatattggtcaggaaacaaatgttgtatctgaccgaaaagaaacatttgcggcgtagcttcgttgctgtaatcctgttgctggaaacgatcctctgttttttgataccgctttcgctggctgtctggttatttatcaacaaactgcaaaatttcaatctggacccgacccaattggtcaagtcggcggaacatattgcgaacctgatcgagcaacggaccggatacgacgtgctcgatacctccaatatcatgtctgctgtctccattctcccgaagatagggcaggtcttgatgggaggaatcagcggtttcgccatcaatgtggccgtactggtgctgatactttatttcatgttgattggtggtgccaagatggaaaagtatgtctacagcattttgccttttagtgacgagaataagaaaaacgtcttgaacgagatcaatatgatcgtcacctccaacgcaatcggaattccgttgctggccatcatccaagggctgatcgctttgctcggatattggatattcgatgtgccgagtcctttccttttcggctttctgacctgttttgccacgataattccggttgtgggtacagcgttgatctggttgccgctggctctttatatgacgttgacaggagattgggcgaatgctgccggactgacggtttatgctttgattatcattacgaatgtggataacctgattcgttttatcttgcagaaaaaaatggcggatactcatccgctcattaccatattcggtgtgatcatcggcttgtctctattcggttttatggggattatctttgggccgctcctgatttcgatctttatactttgtttcaatatattcaaggaaaagtatctggataatgcccgataactgctacttttgtatggataaataaacaaagccatgcatagcagaagaataaaaaacaattggcacatcatcaaaggacagcctcttaccgaattagacaaaaaagtgctttactatcagaataaaggccacctggtgccgtcacgcaaactgatcaagacagcagaacagatcgaaggcatccgccggagcagtgtggtgaataccggggtgctcgatttggttgcaagagagatcaaggccggtatgtctactgccgagatcgataagttggtatatgattataccgtttcgcacggggctattccggcgcctctgaattatgaagggtttccgaaaagcgtctgcacttctgtcaacgaggtggtctgccacggtattcccagtgaagatgagatattggaagagggggatattatcaatgtagatgtttcgactatcttggacgggtattactcggatgcttcccgtatgtttatcatcggtaaaacgacccctgaaaaggaaaagctggtgcgggtgacgaaagagtgtcttgaaatcggtatgcaggcggcgaaaccgttcggttttgtcggtgatatcggcaatgccatccaacgccatgcggagaagaacgggtattctgtcgtccgtgatttatgcggtcatggtgtcggattggagttccatgaagaaccggaggtctgccatttcggacgaaaggggacagggatgcttctggttccaggtatggtattcacgatcgaaccgatgatcaacatgggaacctggcaggtctttattgacgaagaagacggatggacagtcgttaccgaagatgaactgccttccgctcaatgggaacatacgttcctgatgacggaaacggggcttgagatattatcttattgattgatataggttggcggaaggagatgtcgaaacaatatcctgctgactaatcgacatgatttaggcacggaatttaatccgtgcctaaaagagcgtgataaaaggtgttttgatatcgttttattttttgtctttcaacaaatcacgtatctcggtaagcaactgtatatcggctgaagggggagccggagctgccggtgcttcttcttttttcttgttcaaggcattgattccttttactaacataaaaatagaaaatgcgataatgatgaaatcgaaagtcacctgcaaaaagtttccatagttgatggaaacagctggcgagacaactttgtcaccgtccattacagcctgtttcagtatgatctttaagtcggtgaagtttacgcctccgatcagcaggccgatagcaggcatgatgatgtcaccgacgacagatgatacgattttaccgaaagcaccgccgataatgatacccacagccatgtcgatcacgttgccgcgcatggcgaattgtttgaactcttgtagaatcttcttcataatttaacctttttatgttataactacaaaagtatacgtttggttgtggatatccaaaacaatttgagaatcttatgctatgatgaactgttctatatctttttccggagtttgtatggtgtcgatcccgaaattttcgaccaggactttggctacattcggtgataagaatgctggcaatgttggtcccaggtggatatttttgacacccaggcttaacagggctaacaagacgattactgctttttgctcgtaccaggcgatgttatagacgatcggcaattggttgatatcttccaacccgaatacatcctgtagtttcatggcgatcaatgctagtgaatagctgtcgttgcattgtccggcatccagtacgcggggaatgccgttgatatctcctaacggcagtttgttgtaccggtacttggcgcaacctgctgtcagaatcacgcagtcatccggcaattgttcggcaaattcggtatagtagttacggtttttcatgcgcccgtcgcatccggccatgacgacaaacttacggattgccccgcttttcacggcatcgacgactttatcagctaatgctaacacctgattgtgtgcgaatcctccgataatttcgccatgctcgatttcattaggagcggcacagtgtttggcatgggcgatgatttcggaaaaatctttcgttttgccgtcttcgcgcgtcggaatatgtttccaaccggggaatccggtagagttggtggtgtagacacggtctcggtagttggctccttcaagaggaggcacgatacagttggttgtgaacaggatcggtccgttgaaattctcaaactcttcccgctgtttccaccaggcgttgccgtagttacctacaaaatgtttgtattttttgaatgctggatagtagttggccggcaacatctcgctatgtgtgtagacatcgaccccggtcccttcggtctgggcaagcaattcttccatgtctttcaggtcgtgtccgctgatcaggatggctggattgttgcgtacgccgatgttgacgtgcgttatttccgggttgccgtagctgcaggtgttggctttatcgagcagtgccatagctttgactccgaaactcccggtttccagaacaagagcggtgagttgttcggcagtaaggtctttgcgtaatgtatcggcgagtgcacgctggatgaaccgatataattcgggttcttcgtagccgaggttggcggcatgttcaacataggcagccatgcctttcagaccgtaaatgatcagttctttcagcgagcggatgtcttcgtttgcttcccggagcacgcctactgtctgcgattttccttcaaatgagttttcctcgccgttccatatcagttcgtcgatgatgggaagtacgatatctcttttttttgcgatggcgatcaattcgttgcgtaacttaagccccttgatgattcgtccggttatgctttcgatatcaaagttggcatttgtgatcgtggagaatagggcgtctgtcgtaaaatggtttaccttcatggagctttcgatccctgcgttgtggagcaaggtggcgacagtcgcgataccttttgttacgaataacagtaaatccatccggtttgcagttttgtcgtcttttccacagactcctttgtgagtacatcctgtaccttttgccgcttcttggcattgaaaacaaaacattttagtttccatatctttattggttttaatgtgattactgaatcttttttatctcgttcgacaggcaaatgtagggatactacatttctcgaattgtaccaaatgttacaagcgtcggattttttcgtatttttgtaaaaagtagtaagatacggtatgatagagatattaatgaaagctccgttattcgagcatgtgtcttccgatgcaattttcggctttctggaaaaaatcccgtatcgggttgaaagctatcgggtacatgatgttgtggctcttcagggcactccctgcaatcatttgatggttgttctgaaaggacttttacagggacaaatggtgaatgatgcgggaaagttggttgtgatagaagaacttattccttcccgtttgttagctccggcttttttgttcgctcctagacatgagttgcctgtcaatatcatagcagtcgagccttctgaagtcttgttcatatccagagctgattttacagagtggatgcaattggataagcaggttttgcaaaacttcctgatgctgatctccggacgtagcagcttcctgacggataagattatgtttctgtcgctcaagaatattaagaataaaattgccgattatttattgcatcatctttcttctccggatacctcgacggtcaaactgtccgatactcagcaggaaattgccgatcggtttggggttacgcgtccttcgttggcacgtgcatttgccgaaatggaacaggaggggattatttcgatcaaccggaagacgatcacgatcaatcgtatgcaacagttgaggcaaatggcaaaataactcagctgtttattttcctttttatcatgataatatcccaatattttttcttacgtaccttaaagatagagtatttgtatccagagcggaacgaaaaaaaagttttcaaaccatttggaagtttgtattagaagaattacttttgcacccgcattcgagcgagaaggtcggcagttaacatgatgatgaggtagtttcagtgatagcgaggatgaggttagctaggctaagcgaatatccgaccatccgggggctttgaaaaaaaactttcaaaattttccttgaaaagtttgtcagttagaaaaaagttcttacctttgcagccgcaatcgaaacgatagcgcaagttctttgaaagcattacatatcaacaagtagtacaagagacgtagtaggaatactgacataccgtcaagactacaataaacagatagagattctgagcaaaaggtataaaacaaaatcaacaacgaagagtttgatcctggctcaggatgaacgctagcgacaggcttaacacatgcaagtcgaggggcagcatgatttgtagcaatacagattgatggcgaccggcgcacgggtgagtaacgcgtatgcaacttacctatcagagggggatagcccggcgaaagtcggattaataccccataaaacaggggtcccgcatgggaatatttgttaaagattcatcgctgatagataggcatgcgttccattaggcagttggcggggtaacggcccaccaaaccgacgatggataggggttctgagaggaaggtcccccacattggtactgagacacggaccaaactcctacgggaggcagcagtgaggaatattggtcaatggccgagaggctgaaccagccaagtcgcgtgaaggaagaaggatctatggtttgtaaacttcttttataggggaataaagtggaggacgtgtccttttttgtatgtaccctatgaataagcatcggctaactccgtgccagcagccgcggtaatacggaggatgcgagcgttatccggatttattgggtttaaagggtgcgtaggtggtgatttaagtcagcggtgaaagtttgtggctcaaccataaaattgccgttgaaactgggttacttgagtgtgtttgaggtaggcggaatgcgtggtgtagcggtgaaatgcatagatatcacgcagaactccgattgcgaaggcagcttactaaaccataactgacactgaagcacgaaagcgtggggatcaaacaggattagataccctggtagtccacgcagtaaacgatgattactaggagtttgcgatacaatgtaagctctacagcgaaagcgttaagtaatccacctggggagtacgccggcaacggtgaaactcaaaggaattgacgggggcccgcacaagcggaggaacatgtggtttaattcgatgatacgcgaggaaccttacccgggtttgaacgtagtctgaccggagtggaaacactctttctagcaatagcagattacgaggtgctgcatggttgtcgtcagctcgtgccgtgaggtgtcggcttaagtgccataacgagcgcaacccttatcactagttactaacaggtgaagctgaggactctggtgagactgccagcgtaagctgtgaggaaggtggggatgacgtcaaatcagcacggcccttacatccggggcgacacacgtgttacaatggcatggacaaagggcagctacctggtgacaggatgctaatctccaaaccatgtctcagttcggatcggagtctgcaactcgactccgtgaagctggattcgctagtaatcgcgcatcagccatggcgcggtgaatacgttcccgggccttgtacacaccgcccgtcaagccatgggagccgggggtacctgaagtccgtaaccgcaaggatcggcctagggtaaaactggtgactggggctaagtcgtaacaaggtagccgtaccggaaggtgcggctggaacacctcctttctggagctggaatctctagattaagtccgatgaggtatgtagctctctggtactacggttgaatatgtatatatatatgatcttaaactggaaagaccagtatatagagagaaagatgatgctgagatgaaaatttcaggcacataacggttgacagtcctatagctcagttggttagagcgctacactgataatgtagaggtcggcagttcaactctgcctgggactaccagttgaaaaacgggggattagctcagctggctagagcatctgctttgcacgcagagggtcaacggttcgaatccgttattctccacgataaactccgtaaggggtaaaaaaagatctttgacgtattggacaacttcaaaaaagtaaagtaacgaaaaaatagagcaagctgaagatatatcaatccgacacgggcttcaattttagcaataaaaggaagcagtgtcagtgataaagaaagtaagcaagggcagacggtggatgccttggctctcggaggcgatgaaggacgtgataagctgcgataagcttggggtaggtgcaaataacctttgatcccaagatttccgaatggggcaacccggctggtggaaggccagtcattccgtaaggaaggcgaacgtggggaactgaaacatctaagtacccataggagaagaaaacaaaagtgattccgcaagtagtggcgagcgaacgcggaacagcccaaaccgatgatgtttaggcattgtcggggtagtaggaccacgttgtggcaagagattaaggaagtagaacgttttggaacaaacggccgtagacggtgaaagcccggtatacgactctttaacgaagcctagtggaatcctgagtagcgcggagcacgagaaattctgtgtgaatcagcggggcccatcccgtaaggctaaatactcccgagagaccgatagcgaaccagtactgtgaaggaaaggtgaaaagcacctcgaacagaggagtgaaatagtccctgaaaccgtctgcctacaagcggtcggagcacattaaagtgtgacggcgtgccttttgcataatgaacctacgagttactttctccggcaaggttaagggcttcaggcccggagccgaagcgaaagcgagtcttaatagggcgtgatagtcggagtgagtagacgcgaaaccaagtgatctacccttggtcaggatgaaggttgggtaacaccaactggaggtccgaatgggtatacgttgaaaagtgttccaatgaactgagggtaggggtgaaaggctaatcaaacttggagatagctcgtactccccgaaatgcatttaggtgcagcctttatttagtatagcatgaggtagagcgactgattggatgcgagggcttcaccgcctatcaagtccagataaactccgaatgcgtgctatatattgataaggagtgagggcgcgggtgctaaggtccgcgtccgagaggagaagaatccagaccatcagctaaggtccccaaataacagttaagttgaactaacgaagtcggactgcagagacagctaggatgttggcttggaagcagccattcatttaaagagtgcgtaacagctcactagtcgaggagtccggcgtggataatactcgggcataaactgtttaccgaagctatggatgtagaaatacatggtaggggagcattccaacggcgtcgaaggtgaaggatgacctttgctggagcttttggaaacgcaaatgtaggtataagtaacgataaaggaggtgagaaacctcctcgccgaaagactaaggtttcctgatcaacgttaatcggatcagggtaagtcgggacctaaggttaagccgaacggcgataccgatggaagaatggtttaatattcccatactactttatggagcgatgtggagacggagaagtgaaagtcctgccatctgacggaataggtggttgaagagtgtagatgtagattcctgtaggcaaatccgcagggagagtcgaccttgatagtatgccgcgtgcttgcacaaggcaaaatggacgtaatcaggctcccaagaaaatccgctaagcatattcataaagtacccgtaccgtaaacggacacacgtagttgggttgaaaatactgaggcgctcgagtgattcacggttaaggaactaggcaaattgaccctgtaacttcgggataaagggtccctactgagaggtagggcgcagagaataggtccaggcaactgtttaacaaaaacacatggctgtgcgaaatagaaatatgaagtatacagcctgacacctgcccggtgctggaaggttaagaggagagctcatcgcaagagaaggcttgaattgaagccccagtaaacggcggccgtaactataacggtcctaaggtagcgaaattccttgtcgggtaagttccgacctgcacgaatggtgtaatgatctggacactgtctcaaccgtgagctcggtgaaattgtagtatcggtgaagatgccgattacccgcgatgggacgaaaagaccccgtgaacctttactatagctttacattgaatttgggcaatcgatgtgtaggataggccggaggctatgaatcaggcacgccagtgtttgtggagccgccgttgaaatacggccctttggttgtttgagttctaacccgcagaagcggggacactgtatggtgggtagtttgactggggtggtcgcctccaaaagagtaacggaggcttctaaaggtaccctcagaccgattggtaaccggtcgtagagtgtaatggcataagggtgcttgactgggagacagacaagtcgatcaggtaggaaactagagcatagtgatccggtggttccgtatggaagggccatcgctcaaaggataaaaggtactccggggataacaggctgatcgctcccaagagctcatatcgacggagcggtttggcacctcgatgtcggctcgtcacatcctggggctggagaaggtcccaagggttgggctgttcgcccattaaagtggcacgcgagctgggttcagaacgtcgtgagacagttcggtctctatctatcgtgggcgtaggatatttgaggggctctgacactagtacgagaggaccgtgttggacagaccactggtttaccggttgtaccgccaggtgcaccgccgggtatctaagtctggattggataagtgctgaaagcatctaagtacgaagccagcctcaagatgagatatccctagagggtcgttgtagactacgacgtagataggctacaggtgtaagggcagcaatgtcgaagccgagtagtactaatagcccgagactttcgatcatgtaagggttgatatatcagcaggtggctgatgccatatgtttctattagttacttcaggtaatggggttgtccagtcaaaatcttacaaagaggtattaaggtggttatagcgttggggatccacctcttcccattccgaacagagaagttaagcccaaccacgtcgatggtactgcgtaaaagtgggagagtagatagccgccgttttttaggagtgagagcgaaagttctccgtgaaggaagccgattcagttttgagtcggcttttttcgttcccgacagcccattctttagagatcgtgtttttggatggcgagtttgtcctccacgacgttatgtttgatttgcgtgtaatgctcgtattgtaatgtcccaagatccggcagcacgaatggggggataaatgatccgaccgttcagtggagaaagcccgacttggatcagaattctacactgggagtatagaggacacgcggtgtacgacaagaggcttaagtaaggccgttcaatgaagaggattaaccagccttacaaatggaaggcatatcgtctgaaaagcaggaatccagaatccgggattccggaagatgcattctaggagcgggagggtctgataaaaaacggggcctctcagtgttgagagcccccgcataaaagatcttattaagatagcaaacgcttcgattaacaaattctttttttgaagtcatagtcaaggttacatattttttcttagtcaaggacttggatgcacaaacgtaggcattccttttttactatgcaagtatttgtttgtttatttttgaaacaatcggattttactgaattgattttgttactactttgttacttggacttggaaagttcttttcgtaagtagaccatatccactagttgcttgccgtcttcgtatataggatgatcataattgtcggtaaagaaatccttgatacgatgcgagtatttgaatccgttctgttcatagaaagggatggtcagtggactttcacctgtgccgacaagcagagtgtcatatttccccgcataatgttcggagataaatcggatcaatcttttgccatatccctgtttctgatattgtggatcggttgcgatatttttgagttcgatcgttttgccaccttcatccgtgacaacacaaatagtttttaggatattttgatcgtacaaagcaaacatttctccccgttcgagataaaggtctaccatcgattcctgttcatcggccaacaacagaagatcgaggaaacgtttcttatggcggaggatttgccggatttcgaaggaactgtctgaaatttgtacgattgtttcattgagcgaaagatgcaggataggaaatggattgccgtttggatcggtttcatctcttccgacaatatcaaatcctctgttcagatagaaagaagtagccttttcgttttgttcgttgacgtctactttgaatatatgtttgtggtaaatggcaaattcgattaactgcttgccatacccttttccttgttcttccggatggacgaaaagcatttcgattaattcgtcacttagtcccataaatgcagctatccggttttgtccatttcggatgatgtataattcgacaaccggaatatatttgttccggattaacggcttgaagaaccggatatccttttcggtcagaaaacggtgggtgcttcgaacggaggcctcccatacttctaccaattcgttttttagcttttctgattcatcaggactaattgcagaccaatttattttctgtagcatggatttttaataacaatggatttctatttatgaaaaaattcttgtagcagatgccggatagcagctgtcggatgatataatatcattctggggccagcaaaacgcatgacctcctgcattttcttgcgcctatccggtttgtagcaatgaacagggcataacctgcatgttgttttcttctctccgaaaggacaatgagacagtcgtgcatgagcatattgcaaaagttctttacaatccgggcataaatccgtatgcttttctttctgacggcaatagatacggaccatctgtgcgacgatctcctgttcttgtcggatacgggttgatggcatattgagtctgttcttttctacaaatttaggcataatcaacattatcttccaagtttaaataccaaatacgtgcgggtttgttgtttctgccatatatttgttgatcggatgagtttttaatgtagttttataggaagaaggaatatatggaatatgcagaattgttgaaacggttgacggtggattgtaaggatgacggaaaacagtttcggaagaaagaccggatacatgagataaaagccttgttggaaaattcgggttatgaattgttgggcgagggaagtctttctttgctgtatggaaagccgatagaagaagaaaatacttaccggacgcttgtttcatcccatgttgattgcgtttataaaaattgttttgccaaagacgaagacgaactttgctggaagggcacgttcgacaatagtgcgaccaatgctgccgtgatcgacctgatgttgcggggcgaactggatgaatccgttctggtcgctttcacgggagatgaagagaaagactcggcaggagccatcgaaatcatgcagatgttaggccgaatggaatgtctggtaggtaaggctctcgtgcttgatgtcacgaatgaaggttgggaagatgaagctgctttctctatcgaaaacgatcatggttttgatataataaccggttatcacattgtcgaattacttcaagcaagcggtacttcgtgcgtgtttgtacatgaagcagaacccgatgagacttgggaatacagtaaaagctccagctcagatctgccgggaatcccgtgcctaagtctgtgcttgcctgtctgtggaaatatgcatggggatgatggagtcttgttgcgcaagtcatctgtcatcccctatgaagatattctgagaaaactggcaaatgccgttttctaattcttattgataggataaagaacagtattcaaatacggcaggctccttttcgtctccttcatgataaagtcccggacgtgccacccgatcccagcgaataagtgagcgtatggcttcttccgatagaccgtggttcaccggagtccattgcttgccgtctttactccaggcgaattgataggggagtccttctttcacctgcatgcgcagatgcaatgccatgctgggcagtggcagatcggccaactgttgttccttcccttctcgaaccaactttatttgcaatcggtcgccgaccgggccgtaagcgatataatagctattatccccgtaaagcgtgatccctttccaactgccattttggtttgttatgccggcatccaatgtgtagcccgaagatgcaggacgaaggcaaagtgcctctcctgccttgcattccggcttgggagaaccactcagccacagtctgcccgcttcgattttagtttggacattcgagtacggataattccaactccattccgggcgcaggttcgggtcggcaaaattgtcgaagaaaccagttaccggctcttgcacgcaatcggcaaaaggcatcggttgtaccaagcgggcatattcgccggtaacgaaataaggccagttgtcctctccgaaacgcaactcctggagatggggctgacgccctaaaaagaaatcgctgccttccgaataggcgtgacatagataaaacatacgtccgtcaggcgttgtcgtcagtgtgccatgaccgatagattgtatctcgtcgctcccgtgcaggatcggatttccttcatacttttcataaggcccttcgagcttcttcgagcgggcgacagctacggcatagtcgctattgggaccgcaacaaccattaatcgcatagatcagatagtagtaaccgttctttttgaaccagtgctgtccttccattcctgcacgttcgtcgtcgcgaagtaggctgaacggcttgccagtcaatttcaacccgtccggagtcaacttgctggcgagaagttcgatcggccggttgtccagtccataggctttccagctgatgtataaatcacccttgtcttcgaggataaaagcatcgatcgcttccgttccgaattcgacaaccggtccgtgatctttgaatttgcctgtcggagagtcggaagtggctactccgatgtaggaagtgttgttcgacttctttcgtgcggtatagtatacataaaccttaccgttatgataataccattccggagcccagaacgacgacttggtccattccggctgctgctcgaatacgtgtccggtctgtttccagttgactaggtctttagatgtgaataccggatagtagggagcccattcggaggaagtccccgttgcataataagtatcgtcgatcctcaggatggacgggtcggcgacatccccgtgaataacaggattggtaaaataggtctgtttctgggccatacttgcgccggaatacaggacggagcctaacaaggcgatgatgagtctgttcatggtctgttaaaacactaataattaattggtctaaaattgatggttacaaatctactggataaaacggagctgtccaaaaaaatcctttatttttgccggataaaacgttttgattcggaaaaagcatgaacaaacttcactattttgcagattctatttctcttctctctttgccggaaaagtttacctatccgttccattataccccgcatcccctttgtgtggcggcagcgggcgaggtcgggcgctatttgtcgacaaagggagaatggcaggaggaactgcggaaagggaagatgttcggcgttttgattgtccgtacaggagagggggaagtcggctatttggcagccttctccggcatcctggcagggaagaatcgacacacttattttgtgcctccggtttatgacgtgcaagagccagatggctttttcagaatcgaagaagaacagatatcgggaatcaacaggcggatcaaggagttgcaggcagatgtgcgatataaagattgcaagcaacggttggctgacgagacgatccttgccggacaggttttggatgatatacgggaacggatgaaagcggctaaggttgaacgtgaccggttgcgttcgaccgtcacacgggtagattcggagcagctgatccgtgaaagccagttccagaaagcggagctgaaacggcagaaacaatattggaaagatcaccttgcctccctccaaacggaagtagaggtattcgagacggaaatcgaacgcctcaaagcagaacgcaagacccgttcggctacccttcaacaatggcttttcaaacaattccgcatgttgaacgcccgcggagaggaacgggatttgtgcaacttgtttaaagataccgtccaaaagacgccaccggcaggtgcaggtgagtgtgcggctcccaagcttctgcaatatgcctaccggaacggttggcaacctcttgctatggctgaattctggtggggagattctccgaaaaacgagatccgccgtcatggatattattatccggcctgcaaagggaaatgcggaccgatcctgaagcatatgctacaaggcctacacgtcgaggaaaacccgttggaaacggatatgcaccggggtacggagttggaaatcatgtatgaagacgaatggttgtcggtagtgaacaaaccggccggcatgttgtcagtccccggaaaatcggatatcgattccgtctacgggcgagtgcgacggatgtatcccgaagcgaccggaccgatggtcgtgcatcgcttagatatggcaacatccggtctgatgctcgttgccaagacaaaggaagtgcaccagaacttgcaggcacagttcaagaaccggacggtgtgtaaacgatatgtcgcttggttggatggcattgtggagaaaaaagaaggtcatattgaactccccctccgcccggatccggaagaccggccgcggcaggtgttcgatgcggttcacggaaaacctgccgtgactgattatactgtgctgcattatgattcggggcgtacttttatttctttcataccgaaaaccgggcgcacacatcaattgcgtgtccattcggcccatccgcttggcttgaatgccccgatagtaggggatgagttgtatggcaggaaggcagaccgcttgtatctgcatgccgaatacttggggtttattcatcctgtctctggagtgtatatggaaatagaaaaggaatccggctttgatgatcttttatagttgtgccgcaatttcttcatgccgttggcactgttgtttcctcggcatggtacagtcgtttcatgctgaggaaacaacagtttcatgctatggtaacagttgtgccatgtctatgtaacggttgtgtcatgcctatggtatagcgattgtcactcgatatagatcattttctttgtcatccctccgtcgatcgttacgttctcgccgttcataaaatcattttcctcctggcagatgaacaggcacaaacgggcgatgtcttccggtttacctactcgccccgacggatgttgggcgtgatcttctgggcgaagcagttcgtagtcgcgcgtctcgatccagcccggcgaaatcgagttgaccgtgatatgccattgggcaagcgatagtgcaagggcgtgtgtcagcgaatagataccgcctttggatgccgcatagccttcgctgccgggttcgctcatcagatagcgagtggaacagatattgacgatccgtccgaacggattgggtgcctcctgtgattggcggtgaatggccaatctgcgggaagtgatgaaaaccggacgcaagttcacggataatatccggtcgaaatcttccacaccggtttccgtgataggggagaaacaactgattcccgcattgttgattatgatatcgatatcgccccattccttgaaaatctgctgcatgcagttctctagcgcttcttggtcacttacgtcaacatggaaaaaagaggttccggtctgcaacgctgtctcttttcccgccgcttcgttacggtcgcagaacgccacgcggtgtccggcggaacggaaagctcttacgatcgctttgcctataccttccgcacctcctgttacaaagactctcctggttttgtggataacggttgttttcctgccattgtacggatggttcgtacgtccctccttgcgggatttatattcttcgtatttcttttccagatagttgtctgccatgatctttcgctttttaataggatggcaaaagtaatcataattgaatctatttacaatggttgtaggtgaacgatatgcaatcggggaattattgtggattcggagcacgaagttgccagaatgccacggccgctgcggctgccacattaagtgaatcgacaccgtgcgacatggggatgcggacaacatagtcggctgcggcaatcgtttcctgcgaaagtccgtccccttcggttcccatcacgatagccaatctgggttcggttgccaggacaggattatcgatggaaatagaattgtctgtgagtgccatggctgccgtacgaaaacccagtcttcccaagtcgccaagagaaccgtccatccaagtccagggcacaagaaagactgtccccattgacactctgactgcgcgacggttcaatggatcacaagagttgcgtgtcagtaatacggcatcaattccaagagccgccgccgaacggaaaatagcaccgatattggttgtgtcgacaactccatcgattacgacgatgcgtcgggccttctggcatacatcttccatgccgcgtggctcaggacgacgcatggcgcaaaggacaccgcgtgtcaggacatagccggtcaatgtcgcaagcaactccctttctcctgtatagacaggcacgttgctacaacgttcaatgatatcggaagcatctcctgtgatatgcttgtgctcgcacaaaatggctaaaggttcgtagccggcatccagagccctcgtgataatctttgggctttctacgataaaaatacctttgtctggctcgatacgattgcgcaactgagcttcggtgagtgtacagaacatctcgactccgggatgagataaagaagatatttcgataacaggcatttgacaagtcttttaataaatagcaatcttgattacaccgtccagtttgttttcaaaaactcgataagcctcctcgatctcgttcaatgcaaagcggtgggtgataaggggagtggtgtctatcttgccttcctcaatcagttggagaatttcagcacaatcacaaccgtctactccaccggttttgaaaatcaggttcttaccatacatgtcaggcagagggaaaagtagaggtttatcgtaaagagccacgattgtgactgtcgcgtttggacgagcgcattcccacgccatctggaaactgtcttcgctccctgccacttccagaacaacatctgctccgccgtggtcactgtttttgagtacaaactccttacagttatcaggagtcgtgatcaatacgtcagggtaatgttcacggataaaccgaaccctttcaggagacttttcacagacaatgatatgcttcgggttcttcagcatcgagcagagtaaagtacaaattccggtaggccctgcaccgatgatgaggaccgtgtctttctccgtaatttccgagatgcgagtagcccaaaaacctgtggcaagtatgtctccgacaaacagagcctgctcgtcactgaccgtgtcgggaatgcgattcagtccttgatcggcatagggtactctgacatattccgcttgtcctccgtcgatacggcaacctaaagcccagccaccgttgaggtcggtacaattattgacatatccgtgttggcaaaagaagcatttcccacagaaagtctcgacgttcacggttactctgtctccgggtttgacagatgtgacgcctgttcccacttcttcgacgacacctaccatttcatgtccgacggttgttccgagtattgcgcggggtacacttccgtgcttgatatgcaggtcactggtgcagatactacccagggtcacacgcacgatcgcatcccgtgcatccgtaattttcggtttcggtttttctgttaaaccaaatttgcctttttcaatatatgtatatgcaagcatgatatgatctttattgattaattgattcttttccttacaaagatacgaatttcatcaattgtaatcctataaattttttgtcaatccagacaaaagatttacctttgttgtatgcttagaattgtaacacatattgaacgtttgcttttagtgcatgattgtgtgattgtgccgaagttcggaggttttgttctgcaggctgttccggccatgcagcataaggaggaacatacgtttcgtcctttgagaaaagagatcggtttcaatatgacgctgcaacataatgacgggcttttgcctgaatcgtatatgcagatgcacgaggtgagctatcgtcaggcacaactgatgctggaagaagatgtggaggatataaagaacatcctgcaacaatatggaaagttgtcgttaggggtgttaggttcgttcagcataggagaagaaggacagatgattttccatccgggggaaaccgatctgttcagtgtcggctcgtatggcttgcctgttttccatttcccggttctcgctccactagagatggaacgcgaagaagcggttcttcttgcatcccaaaaagagaagaaagatactctttatattccgattagccgtaaacttatccgtacagtgatggcttcggctgctgcagtggtattgttcctgttggtttctactccggttagagatgttaaccaaaaggcttatacagccagttttgttccgacggggatggttgtacaaaagccggttcttcttgaagcggttttgccagacagtactgtggcggaggcagatacgaagcaagagccatcggaagaggtgattgcgcgtgaagtgaaaaaagttgtgtctgttccggctccggaaaagaaggcgtttgtgtccaggcctgtagttgtccaacctaaaaaaatgtatcatatcgtaatcgccagttttccatcagaatcgcaagcggacgaatttattgccggtgtagatcgtaacgaatgtaagcatgtcagcaaggttgttcgtgacgggaagtatcgtatctatgcggataagttcgataatcgcgaagctgcggaatcttatatggcaactctccgttccaatccgaaatataaggatgcgtggttatttattagccgttgatttataatgaatagaaagaaatatccttcagttgaaaagttattttctaccgaaggatatttaaaaaacgtccggacaggttttcgttattattgttttctactctttatttttctcttcagattttagtattcgtttctttttgaggcgccctgccttgcgtagggcttgatccaaaatgtattgtatctggccgtttgtactccgaaattcatcggcagcccaggcttcgatcgcttccatcatttctgcgtccacacgcaatatgaaactcttggtcgcatttccattttcctttttggccatatttaatattactgtattaagttactgatataaagtacctgtattgactacaggttgtgcggactcgtctgcgcaaaggactaccagcagattgctgaccattgctgctttccgttcttcatccagctcgacaacaccgtctttctctaacttttccaatgccaggtgaaccatgctgacagctccttctacgatccgttcgcgggcagaaatgatggcgtctgcctgctggcggcgtaacatcacgctggcgatttcggatgcataagccagatagttgatacgagcttccacgatttcgattccggcgatggcaagacggctgttgagttcgtcttctaggcgttgggttatttctccgctatcatcggaacggagtgtgactttatcaatcgtctcatttgtgtcgtaagcatacatgcctgctacttgccgaagagcggcatcgctttgtatttggacaaactctcggatgtttccggatatatcgaaactggctttgtaggtgtcttttattctccagacgaccacggctccgatcatgatcggatttccgactttgtcgttgactttgatcgggtcgatgttcaagtttaggatgcgtaatgttacggttgatttcaggaaaagtgggtttacccaatagaaaccgttacttatgaccgttccggcatatctgccgaaaaaagtcaatacgcgcgaattgtttggctggatgatcataaatccgggtaacatgacaacaacgcatatcccgcagatgacaccggcgatgatactcggtgtttgtggcagtgatagtagatatatggctgtccctgttaaagcaagcatgataagtatagccgtaaaaccggataatttgatgccgtcgaagttcttttcctgtgttttcataatgatcgttatttgatattattttgatatcacaaaataagacaaagtttcggacatatgcaaataaattatggactttttatgagtagatatataaaatattctatagctttgtctacttaaaaattacacgattggaatttcagttagacacagataataaggagtttcaggatgccctgcaactgatcactcatacacgtcagtccgtcttcctgaccgggaaggccggaacgggtaaatccacgttcttgaaatacatctgcgcacatacgaaaaagaaatatgtcgtattggcaccgacagggatagccgcgattaacgcggaaggggtgacgcttcattctttttttaaattaccttttcgcccgatgttgcccgatgatccggatttgagtctgaagaacggacggatcttcgagtttttcaaatacaggaaagagcatcggaagttgatttcggaagtggaattgatcattatagacgagatttcgatggtacgggcagatatcatcgattgcgtcgaccggatcttgcgtgtcttttccggtaatatgcgtttgccgtttggaggcaagcaattgctgtttgtcggcgacgtcttccaattggagccggtggtccctgccgaccagaaagaaatattaagtctcttctatgccagtccgtttttcttttcggcccgtgtcttcaaagatataaatctggtcccgatcgaattgcagaaagtgtaccggcagacagatcctgtatttattaatattttggatcgtatccgtagcaatattgcccggaaacaggagttggatactttgaatgctcgctatttccccgattttatacctcgaaatgaggatatgtacatcacgcttgccacccggcgggatcaggtggattttatcaatgaacggaagttgggggaattgcccggtgaagagttcgtttctcacggcaagatcgaaggtgattttcctgagtcgtctctgccgacacaattaaacctatccatcaaggagcaggcccaggttatttttatcgataatgattatgaacgtcgttgggtcaatggtacgatcggtatggtgtcggggatcgacgagaatgggaatgtctacgtcctgttagaggacgggagggaatatctggtcgagccgacttcttggcgcaactataaatataaatacaacgaaaaggagaaaaaggtcgaagaagaaattgtcggtactttcgagcagttgccgattcgtcttgcctgggcgatcaccgtgcataagagccaggggcttacgttcagccgtgtcgtggtggatttgacaggcggcgtgtttgccggtggccagacatatgtcgctttaagtcgttgtacgtctctggaagggctggtgctgaaaagccggatttctccgcatgatatctttgtgcggaaagagatcgtccagttcagccagatgtttaatgaccggcagttgattgaaaaaagtttgcgtgaaagtgaggcggaattgttgtatgcacgtgccgcccgttgttttaaatccggcaatgtgaaagagatggttgaggctttcgctgctgctgtcagtaagcggaatgagctggaaaagccagaagtgcaacggttgctccgtatgaaattgcaaactatgaacactcaacgggcgcagatcaagaaactccaggaggagatacacgcccagcgggagattcagaaagaatatgcccacgaatactatttgatggggaatgaatgtattacgaaagcgcacgattcgaatgcagctattcgctctttcgacaaagcgctcaagctttatcctgagtttgtggatgcttgggtacgtaaaggagtgacccttctcgatatgggtgacggtttccaggcggttacttgcctgaatgaagccgtgcgactgaacccgaaatcatttaaagcgcgttataatcgtggaaaatcttatcttcaactgaaatattacgacgaggccgtttctgactttatgaaagctgtcgatctgaaaccgaagcacgctgcagcccatgaatatcttgccgaagcatttctgcatataggggaggaagagttggctcggcagcatcaggatattgccgatgaccttcgtaatgggaatgaaaattaataagttgtcattaattttgtacagaaatataataaaagcgtgataataaggttgtatctttgtgatgcaatgttaaattttgtagagggtattcattaaaaataaatttctgtatgaaaaaagttatctgcttttttgtatgtgttttgatatgcatagggttctccgtaaaagctcaggtgacaacttccgtactgagcggaaaaattatcgacgatcaaaatgagtatgtgataggagctacggtggtagcggtacacgaaccatccggaaccatgtatggtgcggtaacgaatgtggatggccgttacacgatccagggaatgcgtaccggaggaccctataaagtggagatttcctatgtcggttataaaaaggctatttttacggatatcaggttggaattgggcaatacatatgtcctgaatgcgaccttgtatcccagttcggagcaattgggagaagtggtagtcactgctgatgcaaaagcgaatatcggtgcatccgaaaatttttctacaggaaggatacaggagactccgacggtcgaccgcaatatatatgatgtcgtaaagaatatgccgatggccatgacctccaaaaacggagggatcacgtttgccggctccaataaccgttataacagtttccagatcgacggtacggtgagcaatgatgttttcgggctggctccgtcgggtacaaacggtggtcagacgaatgccaatccgatttcgatggatgccatccaggaaatccaagtggtggtcgctcctttcgatgtccgccagagcggttttaccggaggtggcatcaatgctattaccaaacagggaaacaacacatatcatgcatcggtctattcctattttacaaatgaaggtctctacggaaaatacaatgcttataaagataacataaaggataaattgacggaacagtccacaaaaacttttggcgggacgttgagtggtccgatcatcaaagacaagctgtttttctttgccaatgcagaaaaccgtaaggaatcttatccctcccgtttctatgccggatatgacgagaaaggattttccaccgatatggcacagaaaatcgccgataagtatgaagaatataccggaatccgtgagagcttcggatcacgcgatgtagatcagagggcctttaatttcttaggacgtatcgactggaatatcgaccggaacaataaactggctttccgttatcagtataataactcatacgatgacattttcagcccgtcaagcacgacctacttctttaacgggagtggttaccggatgaaaaataagacgaattcgtttgtggccgagtggaactcccattggagcgatgtcttgtataacgagtttcgtgcaggtgttacgacagtccgggatgaacgccaggtggcttatcaagggccgaacgtaaagattaacggtagcgataacagcggaacgaacaatacgacggtcaacatcggtacggagtattcttccggtgcaaacgccctggatcaggatatttacacatttgaggacaatctttcctggtataagggtaatcatacttttaccttcggtacgcacaatgaaatattccggatgaagaacctctttatccaggccgttaccggctcatgggagttcggttcgatggacgcattcttgaatgacagtccttccaaatatgtattcaagtatacggaccccgatgtgacgggcggtaactatcgctatacacctattattaaagccggtcagtttggcttctacgcacaggacaaatgggatgttgccgataatttctcactgacttacggtttacgttttgatatccctttgttgtttaatgatccgacagtcaatcatgagttcaatgaatatgccgcaagcaaaaatattaaggaaagagtaggagaaatgcccggcgccaaagtgatggtatctccccgtctgggattccgctggtatacggacgatagccggaccaccttgattcgtggtggactggggttgtttacggggcgcgttccttttgtatggctttccaatgcttataataataccggggttgagcagaaaggtacgactatctttgcttccggttcgacttccgccccttcgttgggacaatatgcggatgatccgatcggagccatgaattcccaaaagggaaatcctgcgacccccgatatcgtgaccgtgtccaaagactttaaatatccgcaggttttccgtgtgaacttggcattggaacgtgtcttgcccggtgatgtgaagatgactttggaagggctatattccaaaacattcaataacgtatattttgagaacctggcattatcgagcaatgccaaagtctatgccgttccgggtgtggaaacttccgccactccttattactccgtagacaagaagtatttcagtattaccaatctgaaaaatacgaatatgggatatacctattctctgtccgccttgtttgaaaagagtttccatttcggtttggacttggctgcgtcttatacgttcgggcattccaaatcggtgtatgacggaacctcttctgtggcttattccaattggaaatataattatgcggtagattccaataaccctggtctggcttattccatgttcgatatccctcaccgtgtgatggtttccgtcggttatcggactccccgctatgccaaaggcttcatggcaactaccgtctctcttgtctataacggctacgtgggacagcgttacagtctgacgatgaacgaatcttactacgatgccgagaaaaagaaaacggtctatatcgactacaacggtgacggctggggtggaaactcattgctttatatcccgactgaagacgaactgcagaagatggacttcaagactgaagaagaccgtcggaagtttgacgaatggatcgaaggcgacagctatgcaaagaaacatcgtggagcgtacgccatgcgtaactccaattcggctccgtgggaaaaccgggtcgacctgcatgtggcgcaggatatcttcgtgctgaaagaccgtggcagcaaattccaggtgacattcgacgttacgaactttgccaatatgttgaataagaaatggggaaccacttacaccgcagcctataacgtaatgcctttgcaggtaatcggcagtaagaagggggaagatggcaactacacaaacacatatgcttataattcgaggaatacgatcaccaagaatgatgttttgtctcgctggcatgcccagatcggttttaaatatattttctaaacctatatgtatagatttcagacattcatattagtaagtctcttttcgataatctgtttgtcgatagccggatgtacggctcactcgaagaaggaacgctacgtcgtagtcctgtctatggacggttttcgttcggattatccgtcgcatgcacatacgccgacgttcgattcattggcctgcgttggggtgaaggctgcttttcgtcccagctttccgagtgtgactttcccgaaccattacagtatggcgacaggcttgcatccggatcatcatggattggtgaataatttcttttatgcccccgatctggatagcgtctatgtgatgggaaatccgaatccagcctttttcggaggagagccgatctggaacacggcggaaaagcagggtgtccgaaccgccctcgttctattgggtcggtagtgaatatccgatacagggacgccggccttccatctggaaaccgttcgataagaatgttcctttttctgacagggcggattcggtgattgcctggttgcaactgccggaggaagtccgcccgcacctgatcatgtggtatatggaagaaccggacggggtcgggcatagggcaacccccgattcgtcggcaaccctttcaacggttgaacatttggaccgtatattaggtaacttctttgctgaagcccgtaggctggatatctttgaccagattgattttatcgtcctgtctgatcatggcatggcaacttattatccggagaattatgtgaatctgaacgattatctgcctcgcgacagtttcgattatgttttcgacggagtgccgactttgctttatccgaaaccgacttatacagatagcgcttatgcaatcctgaagcgtgtacctcgtgtaacggtttggagaaagaatgagattccggaaaagttcgtgtatggaaagaatccgcgtataggcgatctgttcgtattaccggatatcgggacgtatctgcaattccgccccgaatcgtgtcctgtattcgcggctacacatggatatgataactttgctccggaaatggaggccatcttctatgctgcagggccttccttcaaacagaatgtcgagctgccggtgatggcgaatgtcaatttgtatctgataattgcccgcttgctggatctgcagccggctcctaatgatggagatagcctggttatttcaacattgttcagataagtataatttgctttcatctgagtgtaagtcggactcggaaggccactatttaagtggcaataaccatacttctattgcaaaaccgcttaaccatagaccttttgcccttagtcgaaaagcaaaagagtagtagtcttggttataaatctcagtgtatatgtttgttagtttgggttgttacgtccttatttttcactaatatatagttgtggatataaagcgggaggtggcatggtcaacttgaatcaggacgagacacgtttgttcataacctgaaaaagaaaaagctcgcaaatgaactgcgagcttcttgtagtgcgtccggggttcgaacccgagtttccgccgtgagagggcggcgtcctagaccactagacgaatgcaccgggtagtctttgtttgacgttgcgaaattagtaaatattttattccgatgtatcatttggagaaatttttttgaagaaaatgtttgtctcctgtcattttggtatccacattctatgtgtctccactaaaaggcgttaaaagaggtgtcaaattcgtttgtatttcatttgcgttcaagtttatttattctacctttgccttctgttattgaacaatatactattgaacaattactaataccagtattaaaataactaatattatggcagaattaaaagaaaaacttttctcagaattcgcacctgtgtctactgaagagtggatggcgaagattacggccgacctgaaaggggttccgtttgagaaaaagcttgtttggaagacaggcgaaggatttaatgtgaatcctttctatcgtgcagaagacatcgaaggtttaaagactaccgagtctcttcccggtgaattcccttatgttcgcggaacaaagaaggacaacgattggaaggtgcgccagaacatcgaagtcacctgtttcaaaggtgctaatgaaaaagcccttgacatcctgaataagggtgtgacgtctcttggcttcatcattaagggaagcgacgtaaacgctgaaaacattgctaccttacttgacgggatttgtcctgagtgtgtggaactgaatttcaatacttgcaactgcaaggctgaaatgctgatcggtattctcgccgactatttcaaaggcaaaggcgcagacctggaaaaatgcaaagggtctgtaaactacgacccgttcaagaaacctctggtaaaaggtaaggaaaatgaagactgggtggaagctgctgccgctgtgctcaaagcgggtgctgctctgccgggttacaaagtattggcagtgaatgccttctacttcaacaatgcaggtgcttatatctctcaggagttgggatatgcattggcttggggaaacgaactgctggctaagctgaccgaggcaggcctggacgctacggaagtggccaagaagatcaaattcaattttggtatcagctccaactacttcatggaaatcgccaagttccgtgccgctcgttggctgtgggcagaaatcgttgccgcctacaaccctgcttgccagtgcgcttgcaagatgcatgttcatgcacagacttcggaatggaacatgacggtttatgatgctcacgtaaacttgctgcgttcacagacggaagccatgtctgctgctcttgccggtgtcgattcgatcacggttcgtccgttcgacaagacttatcagactccggacgacttctccgaacgtatagcccgcaaccagcagttgttgttgaaggaagaatgtcatttggataaggttgtcgatccttctgccggttcttattatgtggaagttttgacaaactctctggctgatgtagcctggaagttgttcttggaagtggaagataagggcggttttggtgcggaagtcgcttccggcgaaatccagaaagcagttaacgcatccaacgaagcccgcaagaaagcagtcgctacccgtcgtgaaatcctgttaggaaccaaccagttcccgaacttcaacgaagtggctgccgaaaagatccagaacgaagctgccggttgctgctgtggtggtggtcacaattgcggtgaagcgactatcacggctctcgatttctcacggggtgcttcggaatttgaagctttgcgtctggcaacggaaaagagcggcaagactccgaaagtattcatgctgacgatcggtaacctggctatgcgcctggctcgttctcagttctcaagcaacttctttgcttgtgcaggatataaggtcattgataacttaggcttcgatacggttgaagccggtgttgaagccgctgttgaggctggtgctgaaatcgtggttctttgctcaagcgatgatgaatatgcagaattggctcctgctgcttacaaggctttggctggaagagcagaatttgttgtagccggtatgcctgcttgcatggaagatctgaaagcagtaggcatcgaccaatatgtaaatgtaaagagcaacgtgcttgagacattgaaagctttcaacgtaaaattaggaattaattgatttatgatttatgatttataatttatgattggcagttcgttgccatgaatcataaatcgcaaatcataaatggtgaatctcaaatcatcagagatatgagaccaaattttaaaaacatagatataaagaatgccggttttgcagctactaatgctgccgaatgggcaaaagccaatggcatcgaggccaattggaaaacacccgagcacatcgaggtgaaacccgtatatactaaagaagacctggaaggtatggaacatctgaactatgcttccggtctgcctccttatttgcgtggtccgtatagcggcatgtacgctatgcgtccctggacaatccgccagtatgcaggtttctcaactgctgaagagtccaacgcattctaccgtcgtaacctggcttccggccagaaaggtctgtctgtcgctttcgaccttccgacgcaccgtggttatgatgccgacaacgaacgtgtggtaggtgatgtcggtaaagccggtgtttctatctgttcgttggaaaacatgaaagttttgttcgatggtattcctttgaataagatgtctgtatccatgacaatgaacggtgccgtacttcctgtactggcattctatatcaatgccggtttggaacagggcgccaagttggaagagatggccggtacgatccaaaacgatatcctgaaagaattcatggtgcgtaacacttatatctacccgcctgaattctccatgcgtatcattgccgatatcttcgaatacacttctcagaagatgccgaagttcaactccatctccatctccggttaccacatgcaggaagcaggtgcgacggccgatatcgaaatggcttatacgctttgcgacggtcttgaatatcttcgtgccggtgtgaatgcaggtatcgatatcgatgctttcgctccgcgtctgtccttcttctgggcgatcggtgtgaaccatttcatggaaatcgccaagatgcgtgctgcacgtatgttgtgggcgaagatcgtgaagagcttcggtgccaagaacccgaaatctctggctttgcgtactcactgccagacttctggttggtcgttgaccgaacaggacccgttcaacaacgttggccgtacttgtattgaagctatggctgccgctttggggcacacgcagtctttgcacacgaacgcattggacgaagcgatcgctttgccgacagacttctctgcacgtatcgctcgtaacactcagatttatatccaggaagaaacaaagatctgtaaggaaatcgacccgtgggctggttcttactatgtggaatctctgacgaacgaattggttcatacaggctgggctttgatccaggagatcgaaagcatgggcggtatggcgaaagctatcgaaaccggtctgcccaagatgcgcatcgaagaagcggctgcccgtacgcaggctcggatcgactccggtatccagacaatcgttggtgtgaacaaatatcgtctgccgaaggaagatccgatcgatatccttgaaatcgataatactgccgttcgtaacgagcagatcgaactgctgaaagaactgcgtgccaaccgtgatgaagaagccgtacagaaagcattggccgacatcacggaatgtgttcgtacgaagaaaggcaacttgctggaactggctgtcaaggcagccggcttgcgtgcatcactgggagaaatctccgatgcttgcgaagttgtagtaggtcgttataaagcaatcatcagaactatatcaggcgtgtattcatcagaaactaagaaagatgcagacttccagaaggcttgtgagctgactgccgagtttgccaagaaagaaggtcgccagccgcgtatcatgatcgctaagatgggtcaggacggacacgaccgtggtgctaaagttgtagctacaggttatgcagactgtggtttcgacgtggatatgggaccgttgttccagactccggccgaagctgcccgccaggctgtagaaaacgacgttcacgtaatgggtgtttcttctttggctgccggacacaagactttggttccgcaggtgatcgaagaactgaagaagttaggacgcgaagatatcatcgtgatagctggtggcgttattcctgcacaggattatgacttcctgtacaaggcgggcgttgctgccatctttggtccgggtacttctgtgtcgaaggctgctgttcagattctggaaatcctgttaggtgaagaataatagctgtaaattttttattataatatagtagactgcgtagctttcgatggagagttacgcagttttttattaccattataagtattgatatgaacaaacaagcaaaactaaaacaagatcaggatgtggcaaaagatgatttaactatcatactatcatatccacatgtatatcggtttaagccaatatgttatggcatgatagttgccgttttgaactgccattcatctgtcataaccatcatggagaaaaacgataatatcctgtgtatcaattatacgataaaaacagggaccgtccgggaacaggtgcaaaacctgttaaagcggcttcttttttcatcaagacaggcttttcttttgtcagaaacagctagcaaagccgcttgagacccgggtgtacccaccacagaggcccgggtgcgggagaggtgcagacccgggtctgcgcgaggcctttgcgggggtgtggggatgtttatccgctgtgttggatgcgtttttatgccctgtttttgcatcttttccggcgaaaaaggtcgttttatatttaaacgcctccgttttgtcgatagctattatttgaacattcttctcgattcgttgcttactcattaataatggttatatttgtgccataagtaatagtgaataaagcaaaaaaggaagagtcggatttggaaatcaggaaagagatggagagaagggtgttgcaggataggcctattcgctttgactgggtcatcaaacgtttgttgtaccggaaggccaacttcaatgtgctcaatggttttgccgtcctcatgggattgctggctgtccttttgcttgtaccgtcttgtacgacggatgataaggttccggatctctccgacgagggtacgaatggttggatctataagatcatggcggattactatttgtggaatgaggatattcctggcaaaggaaatttgaacttctcacaatctccagataagttcttcgattcattgttgtctgatcaggatggcgtaaaatacggagacggatggctcactttttcccggatagagaaaaaggaagaggagacgaaatctgtttcggagtccgattcgtatggttttgagtttgcatcatataaaaacggcaacctttattatgcctgggttttatatgtcttgcccggttctcctgctgccgaggccggactggaacggggggactggattatcgccgttggtagtgagactccgaatgtgacgaacttgtctgctttttatagcggaggtgaaactactttcttattggcagatgcggtaagaaaaggcaatgaggtcactttttataaaagaaaaactatttcggttgcagcttcccgtgcagtggaaaacacgccttttctgaaagattccgtctatacggtgggtggcaagaaggtcggttatctggtttacaacagtttttcttccggtccggacgatgaaagtacaatctatgacgaccggatgaaacaggtctttgccgggtttaaggctgaaaatgtggacgagtttatattggatttgcgatataatcagggaggtttggtcacttgtgcgcaattgatgacctctcttctggctccggccgatgctttgggtaagacattctgtattatggagcataacgaaaagcaatcaaaaagtgatgaaactttgctgttgagaaaaaattctgaaataggaaatgctaatctggacttgaaacgcatttacgtgctgacaggaagtgtgaccgcatctgcttcggaggccgtgatcaattgcctgatcccttatcttacccgtagtaacatcacgatcataggagaaaaaacgattggcaagcgggtgggcagcaacactttcggaaccaaagaaaaatatggctggctgttgcatccgattacattacgcatttataatgccgatcacgaagctgactatgcaaatggttttgaaccggatgtgaagatcgaggaactggttataggaaatgatttgttgcccttcggagatacgaacgagaggctgctgagtgaggcgctttcgcggataagcggattgaagagcctgccggtacatgcggaaagcgaaggtcgtattttgctcaccccgtcatctctcgaaagaaaacaaacgaaaggtcttatcttcgaggagggaaaataaggcctcttgtgccgtctataattgaaggtcttctgccagcttggttttatttttgatatacttacaaagatatttttctcttccggcaaaagctcatattttatccttatttttgtttccggtatcaactaattacgttatgaaaatgataaattgtttcattccgttcctttctttaccccaggccaggcaaaccgtaagagcgttggggttatgtgaccggataaagaatatctacttgttggcgacggaaaagattcccgatgaggtcgaggggtgtgagaggctgatgatcgattcgcccgccagtaccgctactttccggacgattgctttacatgcagatacggcctatacattattatataccaaatatacggcattcgagccggggcagttcgccttcgaacgcctgttggctattgccggcgatacgaatgccggaatgctttatgcggatcgttacctgttaaaaaacggcaacagccaacaggctcctgtcatagactatcagaaaggaagcttgcgtgatgattttgatttcggctccctgctgtttttccgttcgtccgttttgaagcaggcggtccgggcgatggatgctgattaccgttttgccgggctgtatgaccttcgccttcgtgtctcggagctggccgaactggttcatgtcaatgaatatttgtactcggaagtggagacggatatccgtaagagcggagagaagttgttcgattatgttgatccgaaaaaccgggcggtgcagatcgagctggaagctgtttgtacggcctatctgaaacgggtcggcggttatcttgccccggactttgaaccggtcaccttcgatgccggcggtttcgagcaggaagcctccgttatcatcccggtccgcaaccgtatccgtacgatagaagatgctatccgttccgtgctggcacaaaaaacgaccttccgctttaatctgatcattgtggataaccattcgacagacggaacttccgaagcgatcggaaaatataccgcagacggacgtgtggttcatttggttccggaacgttccgatctggggatcggcggttgctggaacgtgggtgtgcatcatccggcttgtggcaagtttgccgtccagctcgatagcgacgatgtatatagcggtcctgatacgttgcagaagatcgttgatgctttttacgaacagaactgcgcgatggttgtcggaacctatcggatgaccgatttcaagatgaacgaaataccgcccggcatcatcgaccatcgggagtggacgcttgaaaacggacgtaacaatgcgctccgcatcaacggtctgggagctccccgtgccttttatacacctgtgctccggaggatcaaccttccgaatacaagctatggagaagattatgctttgggactgcgtatctcccgcacctggcgtatcgggcgcatctatgatgtcctttacctctgccgccgctgggaagacaattcggatgccgcgctcgatgtcgtgaaaatgaacggacataatacctacaaagaccgtatccgtacttgggaattgcaggcgcggattgccttgaacgctcattcgcccaaatgatttcttcttggtcttttggccgtttgctcactatggattcttttttcactacatttgtgttgcgggacaagttgccggcaaccatgaaaacgcgaagcttatgaatgatttggaacgagaaatagaattcctgctgatagaccaaaagcaggattggaaactggcaagggagaattatggttctttgaccaatgtgcagacgcgttatttccaggatgattacaggacaacgattcttcaatttaatccggaacggattcgttcttccgctgctaagatcgacaaggcatccttgctggcgcgcccctgttttttctgccatcggccggaagaacaaaagggagtgatgtataatgatgcgtttgaaatactggttaatccataccctattttcgaggaccatctgaccgttcccctgcgttggcatgaaaagcaacagataaagccttattacgaggatatgctggacatcgtttcagatttatctgactatgccttgttctataatggtccgaaatgcggtgcttccgctccggatcatatgcatttccaagctggaaagaaagaggagtttccggttgtgagaaattggccgaacttcccgaaacaggtcgtttgggaaagtgaacggactggtttctatgcttcagtcgatctccttccggtctgttttatcctagtgtcgagggataagggtgaggcggcggccgttttcgagttgttatacgacatgatgccgatgggaccggaggattacgaaccaatgatgaacctgctggtctggagggaggatgatgtttggattacctgtatcttcccccggcgggaattgcgtccatcctgctattatgccgagggagatgccaatattctcatcagcccggcgacggtcgagatggccggtttatttgtcgtccctttggaaaaggactttaagaaagtgacatttgcagacctcgaaaaggtctgggaagaggtaagtattacggaggatgaggagaatgagctcatccggaaaataagagatgaagcatgatatcatataagcctatgtctgataagccatctgtacggtctccttggttttgggttccttccctgtattttgcgcagggaataccttatgtcgcggtgatgatcgtctctgtccttatgtataagcgcctgggagtttcaaataccgatatcgccctttatacgagttggctgaatctgccctgggtgatcaaacctttttggagtccttttgtggatttgctgaagactaaacgctggtgggtggccacgatgcagttattgatcggggcaggacttgccggagtggcgtttacgatcccaacgacgttctttttccaggcttcattggctgtattctggttgctggctttcagctccgccacacatgatattgcggcggacggtttttacatgctggctctcgattcgcatgaacaggctttcttcgtcggtatccggagtactttttaccggattgcgattattgccggacagggggtgttgatcatgtttgccggatttctggaaaacagtacggggaatatcccgcttgcctggtctgttacattctttattttaggcgggctgtttttggctttgttcctgtatcaccggtatatacttcctttgccgaaaggggataagctatcggctacggtgactccttccacaatcttaaaagagtttttcgcgactttcgcctcttttttcaaaaagaaacaagcctttgtcgcgatcctgtttatgctgttgtaccgttttccggaagcccagttggctaaattggtaacgcctttcctggtcgatccccgcgaagtgggtggcttggggctttcgacggctgaaatcggactggtgtacgggacgatcggtacgatcggtttgacattgggcggaatattgggaggtatcgccgcctcggcaggaggattgaagaaatggatctggccgatggcgttggcaatttcccttcctgacgctgtctttatttatttgagcagtgcgttgcctgataatttgtggatagtcaacatttgcgtatttatcgaacagtttggatacggctttggctttacggcctatatgttgtatctgatttattattccgacggagaacataagacggcacattatgcgatctgtacggcttttatggctttgggcctgatgcttcctggaatggcggccggctggttgcaggaacagatgggttacgagaatttcttctggtgggtgatgggatgttgcctggtgacgttgcttgtcacggcctgcctgaagatcgatcccgaattcgggaagaagaaacaaggaaataactaaatatatttgctttgtatggtggcgaaaacgatattgatagcggatggcggttccacgaaaacggattggagtattgtgtccggcaatcgggagatagaccggatcaggacaggaggaattaatccttttttccagacggaagaggagatctcggctgagataagggacaatctgattccccggataagggagtccgattctgtcggggccgtttacttttatggtgccggatgtgcattcacggaaaagaacgagattatacgccgttctgtcacgcgctatctgccggtcccggtggaggtcggcagcgatttgctggcagccgcccgtgccctttgtggagacagccccggcattgcttgtattttggggaccggttccaactcctgtctgtatgacggaaagggtattgtcaagagcatatctccgttgggctttgtcttgggagatgaggggagtggcgccgtacttggaaaattgttggttggggatgtgttgaagaaccagttgccggcagctttgcaagaggctttttgggcggagtccggtttgacaccggccatcattatggaaaaggtttataaagggtctttcccgaatcgttttttggcaagcctgtctccttttttgctccggcatatagaagaaccggcaatacgtgatctggtgagcaatagcttccgggcgttctttgcccgcaatgtcatgcagtatgattaccgggagcatcctgtctatctgacaggctccattgcttggtattatcaggatatattgaaagatgttgctcgtgagttcgagcttcgattaggaacgatcgttcaaagtccggttcaaggtctgattcactatcactgtgttttataaataataaattatctaattcggtttttatcatgaaaaaatctttattcttattgtgtttgcttctggggatgttgggtaattgtgcgttggtgttggcacaaccggcccagaagttggtcaatgtggtggtttcgcctgatcgtatcgattggaaatgcaaggcgaaggaagaagtcaagtttacagtacaggttttcaagaatgagaatttgttgaaagatgtagttgtcgattatgagttgggaccggaatattttccgacggttgtaaagaaagacgttcgtttggcggatggaaaaacgatactgaaagcgaagatgaatgaacccggattcttgcgttgcagggtgacggccaaagtggacggacggaagtatgaagggatggcgacagttggcgtggatgaaacgaggattcggccgacgacggtcaatccggaagattttgatgctttctggaccggtgcgatcgctgaagcccgtaagcagccgctagatcccaagatgactttgttgccggaaagatgcacttctacgcagaatgtctatcatgtcagtttccagaatgaacgccccggttcccgtatatatggcattctgattgtaccgaagaaaacaggtaaatatccggcggtcctccaggttccaggagcgggcatacgtccttataacggattcaatttgggagaagatatcattacgttggagattggaatacatggtgttcctgtgacgatgccgcaggaagtgtataacaacttggctgctggagcattgaacggatataatgcaatgaacaagaataatcgcgatacgcattactacaaacgggtctatctcggttgcgtgcgggctgtggacttcctctattctttgcctgagtttgatggaaatacagtcggtgtgaccggtggaagccagggaggagccttgtctattgtcacggccggactagacccgcgtatcaagtttcttgctgctttctatccggccttgtgcgattatgccggctatctgcataaacgtgcgggaggctggccgcattactaccggaatgcgcagcctgtggcaaacgaagtggaaacgctcgcttactttgatgtcgtgaattttgcccgccgggtgaacgctccgggctggtatagctggggatataatgatgtgacttgtcctccgacatccatgtattcggcctacaatgttattccgggagtgaaggacttgcatctttacctcgaaaccggtcactggacatatccggaacagcagtcggaacgtattgaatggttgaaagataaatgcgggaagtaaatacgtttcccggttaataataatgcatgtatgtcgaatttaaagtattttttagcgggggtgttaattatggcaataacatcgtgtatgcaaaaggatagtgaattgtttttgtttgtcggatcgtatgcggatgctacagaccctggtataaatctgtttcgcttcgatgtggagaaagggacggctgtgccggtgaaaagcctgtcgggcattcaggacccttcttatctgacagtgagccgggatggcaagtttgtctattcggtaagtgaaactgctgtgccggacgcgaaagtatgtgcctattcgtttgacaagcaaaccgggacgctttctttgctgaacgagcagcatacggatgggagcgctccctgctatatctgggtggacagtaaacgccggatggctgtcacggccaactacaacggcggaagcataagtgttttctccatctcggccgatggagctttgctaccggctgaagtatatgcgtatgaaggaggaagcccgggggccgaacgccaggcggtcccgcatctgcattgcgtgtacgcttctccggatgagaactatctgtatgccaacgatctgggaacggaccggatttataaatacgagatcgttgcttccgataaaggcttgagtttgcgggaagggacgccttcctcttttagtttgccggcgggagaaggtccgcgccatacggtttttcatccgaacgggaaatgggcttacctgattagcgagctttcgggccgcgtcgctctcatgtattacgacaagggcaacctgaccccggtccggtttgtagaagccgatacgttacatgtctccggtagtgccgatatacacatcacaccggacggtcgtttcctatatgcctctaaccgtctgaaaggtgacggtatcgcgattttttctatcgatctggaaaacgggcaattgacaaagattggttatcagctgaccggtattcatccgcgtaatttcgtcatcacccccaacggcaagttcctgctttgcgcttgtcgggatagtcatatcgtgcaggtttacgaaatagacaagcaaagcggtttgttgaaagatacgggaaaagacatccgggttagcaagcctgtttgcttgaagtttaccgacatgtaaatgtgatatttttagtagctttgcaacgtgtaaattgtaataagctatgtcattcattaagataacggaacagaattctctctataacgacctggaacggaagtccgtccgggacttgcttgaagatatcaatacggaagatcagaaagtggcgttggctgtccgagagacaatccccaaaatagaagaattggttttgcagatcgttccccgcatgaagcagggcggacggatcttttatctgggagccggaaccagcgggcggttgggagttttggatgcttccgaaatccccccgacgtttgggatgccttccacactgattgtcggcttgatagctggtggcgatactgccctccggaatcctgtggagaatgctgaagacgatgaggaacgcggctggcaggaattgctggagcaccgggttaatacgaaggataccgtgatcggcattgctgcttccgggacgactccttatgtgatcggtgcccttcgcaaagcacgtgaacagggtatcctgaccgcctccatttccagcaatccagattcaccgatggcgatggaggccgatgtcgcaatcgaaatgattgtcgggccggagtttgtcactggcagttcccgtatgaaatccggcacggggcagaaaatgatcctgaacatgatctctacctccgttatgatccgattgggtagggttaaaggaaaccggatggtcaatatgcagctcaccaatcagaaacttatagaccgtggaacccgcatggttgccgaggaattgaatcttccctataaccaatcccgccatctgctgttgatgtacggctccgttcaggaagctgtcgaggcttaccgcaaagcttaacgggtctggagtcggtttcagcttttttctgtaagaagatgagaaatatatggaaaatatctttatatttgtcccatgcattgttcctgcttcgcaatctgcggaaaaggattaaaagggaatcgggtgcaaatcccggacagtcccgctgctgtaagcttcaaaacggattgggcaattcttttatgccactgacgcgagttgggaaggcgctcataccggaagtaagtcagaagacctgcaacgcatattttttcgacggcttcgaggataggccggaagagaactgtgaagccgtaggcttttgcctttctttatttccgtttcccgtagctatttacttgtttttaattattttgccataataattaggaaaagaggcatgaatctgtgggtgggatgagctccgcctcgattcatgctttccttttatgagtgtgattaatcttccggcttttgtcgtataaacctttttttcgtacctttgtgcgtttcctccataaagagaggaagataaatacgacttcaaatttgtatatggaaatgagaaaaacagtattatatggcgttttggccttttgtttggttgtgttgaattcttgtttgggagacccggctacccaattgacgatggcaaaccaggcaggggtagtggtgaccggttacggacctggtaaggctatttataccaagggggacgtagtggtctcttcggaagatttccagaatgccaatgtggaaaacggagaatgtattttgtttgattattccatcgattacggggtcgcaaacaatatgggggcagggacggataccagttataccgaggctattatttatgaaaatacgatctcggaggttaatcgttggaacttctataatacgttgaccgatacctctattgttgcaaaggacgaactgttgctttcttccctccaggcgcgttccgcttatatcagaggcaatttgttcctgttcacggagataagcaatcacccggcaaaccaagtggacagtttctctttgtcctataattcggataaattgttgggagacgataatatttatagcctctacctccgcacgatcagaatcaaggcggacacgacaagaggcgaggcgatgattattccttgtgcgttcaatatcgaagatctggtgaaaaaggcggaaaagaatcattcggatgaactgaagttccggattaactatgcatattcgttcgggaaggattctgcatcgataaactggaaaagttccgacgtgtttacaatagacttgacaggaaaaggcaaataaaatgataaatagcaaacgagcgtattgaaaaatgtataaagagatatttaaattggttgtagccatcatctcccagccgggaaaggcgtgggatattctgacgagaaaagaagaaaaggacgatgagtttttatcccggtttgtgtatcctctcatcggattcgttacggttgctgcttttttaggcgtgctgttcactcggaaggagtttgatgtcgaactggcgttgaagtcgtctatccggacattagtcgctgcgttcggcggcttttatctggcttcctatttgctgaatgagatttggcagggatggttcaaacgggagaaggatatgaaactgtgtcaacgctttgtcggctattcgtcttcgttgatgtttgcattgaacatcgtgttgatgttacttccggagtttttctttttgcgtatatttgtgttatatacattttatatcgtatgggaaggggccggcccttatatgcaggtggaggagaagatacgcctgaagtttgtcgggaccgcgaccggtctgattttgctgacgccctggttgatcgaggtaattctttccatgctgatgcccggtttacgtttttgataggagaataagatgaaagagaagattagtaataacatacagataaagaacaagcgggcgactttcgattatgagttgctcgacacgtttacggcagggatcgtgctgaccggtacggagatcaaatcgatacgcttgggaaaggcgagtctggttgatacgttttgtattgtggagaagggggaattgtgggtgaagaatatgtatgtggcagaatatttctacgggacatacaataaccatacggctcgccgtgaccgcaagctgttgctgactaaaaaggaattgcggaagattgaaagcgctgcccgcaataatggctttacaattattccgacacgtctttttattaatgataaaggactggccaaagtcgttgtggctattgccaaaggtaagaaggaatatgacaaacgcgactctatcaaggaacgggacgaccgccgggagatggatcgtgcatttaaacggtaacgaacctttatggataaagaaatatttttgaatctcctgaaagaacgcattttgattctggacggaggaatgggtacgatggtccagggatttaaactgaccgagaaagattatcgcggaaaacagtttgccgattggacgagcgacctgaaaggaaataacgacctgttatgtatcacccggccggatgtgatcaaatcgatccaccgtcagtatctggatgccggtgccgatatttttgctaccaacactttcaatgcaaatgctatctcgatggaggattacggcatgcaagggcaggtgagaaatatcaatttggctgccggaaaattggcgcgtgaggtggccgatggctttatgaaggagcatccggatcgcacgatctttgtagctggttctgtcggcccaactaataagactgcttcgatgagccctgacgtgagcgatccggcttaccgtgctgtcacctacttggatttgtatagtgtctataaagaacaggtagacgctttggtagacgggggcgtggatatcgttttgtttgaaacgactttcgacacgctgaatgtgaaagccggactggaagccgccgaggctgtgttgaaggaaaaaggcaaggatttaccaattatgctttctctgacgttatctgcccagggaggacgtacgttttcggggcagacattgcttgcgtttttggcttccgtgcaacataccaatattgttagtgtcggtctgaactgctctttcggtgctgccgatatgaagccttttctggctgaattggcaaaacatgctccctattatataagtgcttatccgaacgccggtctgccgaacagtttcggttcctatgatgagacgccggaaaagatggctgttcatgtaaaatcttttattgacgaagggctggtgaatatattgggaggctgttgtggtacgacgccggcccatattgccaaatatcccgaactggtgaaaggggccaagccgcatgtaccggctccgaggcccgattgtctttggttgtccggtctggagttgctggaagtaaagccggaaaataatttcgtgaatgtcggcgaacgatgcaatgtggctggttcacgtaagttcttgcgcctgatcaaggaagaaaattatgaagaggctttgacaattgcccgcaagcaggtggaagacggcgcgcaggtgatcgatatcaatatggatgacggaatgttggatgccgtgaaggagatgacgactttcttgaacttgatcgcatccgaacctgatatttcccgtgttcccgtgatgatcgactcttctaaatgggaggtgatcgaaaaaggtttgatgtgcgtgcagggtaaaagtattgtgaattcgatttctttgaaagaaggagaagaggttttcctgcaacatgccgctcgcatcaaacagttgggtgcagctacggtcgtaatggcttttgatgaaaaggggcaggcagacacgtttgaacggaagatcgaggtttgcggacgtgcttaccgtctcctccgggagaaagtcgatttcgatccgaacggaattattttcgatccgaatgtgctggctatcgctaccggtatggaagaacataacgggtacggacttgactttatccgtgccgtggaatggatcaaaaagaacctgccgggggcgaaggtgagcggcggtgtcagcaatctttccttctctttccgtggaaataattatgtgcgggaggccatgcattccgtattcctgtatcatgcgattaacaaaggcatggacatggggatcgtgaacccgtcgtcgtccgtactctatgaagatatagaacctgctttccgtatgttgctggaagacgtcattctggcacgccgtccggaagcagctgaagaactgattgcatatgcccagaacctgcatgtaaaagcgcaggagggagaaggtgaaaagcaggatgtctggcgtgaatatccgttgaaggaacgtttggaaaacgctctgataaaaggagtcggcgatcatttggaagaagatttaaaggaagccttgaaggaatatccgcgtgcggtggatattatcgacggaccgctgatgggtgggatgaataaggtaggcgaattgtttggtgctggaaaaatgttcctaccgcaggttgtcaagactgcccgtacgatgaaaaaggcagtcgccatcttgcaaccggcgatcgaggcagaaaaggtctcttctgattctgctaaagcaggaaaggttctgtttgcgacagtgaaaggtgacgtgcatgacattggaaagaatattgtttcgatcgtcctggcttgcaataattatgaggtgatcgatttgggagttatggtcccggcagacgtgattgtaaaaaaggcaatcgaagagaagcccgatctggtctgcctttccggtctgatcacgccttcgctcgaagagatggtacatgtgacggacgagatgcagaaagctggcttgagtattcccataatggtgggcggcgccacgacttcgaagttgcatacggccattaagatcgctccgcattatgactatccggtcattcatgtgctggacgcctcgcaaaacccgttgattgcggccaaactgttgaacccggatacgcgcgatgcttatatcgcccagctgaacagtgagtatgaagctctgcgtgcctctgtgaataagaaaaaagagatactggtcccgttggcggaagcccggacgaatcgtccggtgatcgattgggcttcttataacccggttgtcccggctcggaacggggtacaggtgattccttctattcctttggaagaaataattccatatattcattggaccttcttttttagtgcctggaaactgaatgggcgtttctcggaaattgcgcagatccacggctgtgacgcttgtcgtgccgcctggctggccgaattctcggaagcggaccggacgaaggcgtcggaggctatgcagttatacaaggatgcagttaagttgttggatcgcttggttgagatgaaagccgagtattgcaaggcggtttatggtttcttcccggcaaatggtgatggggataatatccgtgtgggtgaagtcttgcttccagttttgcgtcagcaggcgaaaaaagaggaaggaatctataagtcgttagccgattatgtgatgccagtatcggaagggcgtacggattatgtcggcgctttcgtggtgacggccggtaccggcgccgaatctctgaaagaacggttcgagcaggagggagatacctataattccatgttgttgcaaaccttgaccgatcgtttggccgaggctacggccgaatatctccatgaaaaggtccgtaaggaatattggggatatgctccggatgaatcgctttccatctccgacctgtataaagtgaaatatcagggaatacgtccggctatcggttatccttcattgccggaccagcttttgaactacacgttggataagttgttaaatatgtcacagatcggtgtccggttgacggaaaacggcgctatgtatccgacggcgacggtgagcggcatttatattgcacatccggattcccaatatttcatgattggtaatattgatgaagaacagatgaaagattatgcctgtcgccggaatctgtcggaagcggaagtgaagaagttattgaataaaaacatttcaaattgaaatatatacgctggatagtcttgtctctccttctggccggtatctggtgcgccatgcgttcgccggatatgggagaggcgtatgcccggaatgtatatccttatatatcgggtgctttgtcctgtttttcttctctattttctttttcgataggtgattgcctgatatacggtagtatggccggtttgcttgcttatctggtttatgccattgtgaagaaacgttcctggcgggcgacagccggacggatgatcgaatatttgttgtggatatatgtctggttttatctggcttggggattgaattatttcaggaaagacttttttacacggacggaaatcccgtatgcggcttattcagccgacgcttttcgttcgttcttatccacttatacagattcgttgaatgcgtcctttgtgcctgtcgaaaaaatagataaggccctcgtcgcagaggaagtgaaaaagggatatcatgaaattgccgggcgtttctcttttgtcagtcctgccgggtatttgcatccgaagccgatgttaatgccctttttgatgagtggagtgggggtattggggtatatgggaccgttttttaccgaatataatctgaaccctgatctgctcccggtccagtatccgtttacttatgcacatgaaatggcgcatgtgttaggaatatccagtgaggcggaagcgaatttgtatggttttctcgtctgttcccgttccggagtgccggaaatccggttttcggcttattttgctttgttgccttatgtgttgagcaatgcctacggcttattgtcggaagaggagtttaatgaatggaaagagacgatctcccctgaggtaaaagatctttacaaccggaaagtcgcttactgggagaatttgtacagcccatttataggcgagatccagagtaccgtttacaactggttcctgaaaggaaacaacatcccctccggccggaagaattattcggaagtggtggcattattgatggcactggaaaatacatcaggagagatttgagaccttgctgtttccatattgcctaattcgaattaaatcactacctttgcggcaatttttgagaagatagataaatataacgcatatgagtaagaaatttgccgaatactcgaaacttgacttgtcgaacgtcaataaagaggtgctgaagaaatggcaggatggcgacatcttccataagagtcttgaaatccgcgaaggacatccctcgtttgtcttttatgaaggtcctccttctgcaaacggtatgcccggtattcatcatgtgattgcccgttcgattaaggatattttctgccgttataagaccatgaaaggatatcttgtcaaccgtaaggcgggatgggatacacacggacttccagtagagctgggagttgaaaaaacattgggtatcaccaaggaagatatcggcaaaaagatctctgtggccgaatataatgccgcctgccgccgtgacgtgatgaagtttacgaaggaatggacggatctgacacagaagatgggatattgggtcgaccttgaaaacccgtatatcacttacgacaatcgttatatcgaaacattgtggtacttgctgaaggaactgtataagaaaggtttgctttacaaagggtacacgatccagccgtattcgccggctgccggaacggggcttagctcgcatgagttgaaccagccggggtgttatcgcgacgtgaaggatacgacttgtacggctcagttccgcattctcgatccgaaaccggagatggcgggatttggcgaaccgttcttcttggcatggaccactactccgtggactttgccttccaacacggctctttgtgtgggtccaaatttcacttatgtggctgttcagacctataatccatatacaggtatgccgatgacggctgttttggctaaggacttgttgaatgtgtatttcaatccgaaagccgccgatctggctctgaccgattataaactgggcgataaactggtgccgttcaaagtggtcggcgaatggaaaggaccggaactggccggcatgcattacgagcagctgatcccgtgggtcaatccgggagaaggtgctttccgggtaatcaccggcgactatgtgacggtggaagatggtacgggtatcgtacatatcgctccgactttcggtgcggatgacgaccgtgtggcaaaagcaagcggcgtacctcctttgatgatgatcgacaaagatgggaaccgccgtccgatggtcgatatgacaggtaaattctatctgctggaagacctcgatcccgagtatgttcaggagcatatgaatgcggccgactacgacccgtggcagggcaagttcgtgaagaacgcttatgatgcgaccaaaggcgaaaaagacgaaacgctggatgttgaaatctgcatgatgctgaaagcacagaaccgtgtgttccgcatcgagaagcatgtgcacaactatccgcattgttggcgtacggacaagcctgtgttgtactatccgctggatagctggtttatccgcacgaccgcttgccgcgaacggatgattgaactgaacaatacgatcaactggaaaccgcagagcaccggcacgggacgtttcggcaaatggttggaaaaccttcaggactggaacctgagccgtagtcgctactggggaacgccgttgcctatctggcgtaccgaagacggggcggaagaaatctgcatcggttcggttgaagaactgtacaatgaaattgagaaatccgtaaaagccgggctgatggagtccaacccgtataaggaattgaaattccagccgggcgaatatacgaaggagaactacgaaaagatcgacctgcaccgtccgtatgtggatgatgtgattctggtttccgaaagcggtaagccgatgaagcgcgagaccgacctgatcgacgtatggttcgattccggcgcgatgccttatgctcagattcattatccgttcgagaacaaggaaatcttcgacgaccgcaaggtttatccggccgatttcatcgccgaaggcgtcgaccagacacgcggatggttctttactttgcatgcgattgctacgatggtattcgatagcgtgtcgtataaagccgtcgtttcgaacggcttggtgttggacaagaatggcaacaaaatgtccaaacgtctgggtaatgccgtcgatccgttcgccacgattgagcagtacggttccgatcctttgcgctggtacatgattacgaacgcctctccgtgggataacatcaagtttgatatcgacggtatcgaagaagttcgccgcaagttcttcggtacattatataatacatattcgttcttcgccttgtatgcgaatgtggacggtttcgattattccgaaccggatgtggattggaaagaacgtcccgaaatcgaccgttggattctgtcgttgctgaattcgttggtaaaggatgtggatggattcctggatacatacgaaccgacccgtgccggacgtgcgatctctgatttcgtaaacgataacctgagtaactggtatgtgcgcctgaaccgccgccgtttctggggtggaggtatgacgaccgacaagttgtccgcttaccagactttgtacacttgtctggaaacggtcgccaagttgatggctccgatcgcgccgttctatgcagaccggttgttctgtgacctgatcgccgctaccggacgcgaaaaggttgaatctgtccacctgtccgaattcccggtttgcaatgaggcaatgatcgacaaggacctggaagaacgtatgcagatggctcaggatgtgtcttctatggtgctggctttgcgccgtaaggtgaacatcaaggtgcgtcagccgcttcaaaccatcatggtcccggttgtggatgcccaccagcaggaaagcatcgaagccgtgaaagcgctgatcttgaacgaggtcaatgtgaaggaactgaagtttgtcgataatgccgccggtattttggtgaagaagatcaagccggacttcaagaagctgggcccgcgttacggcaagatcatgaaggcattggccgccgctatccaggcgatgagccaggacgaaatcaatgcgttcgagaaagccggaacattcacgctgaccgtcgaaggacaggaggcgatgatcgaacgtgcagacgtcgaaatcatctccgaagacataccgggctggttggttgcgaacgaaggccgcttgacggtggcgctggatatcaccgtgacggaaaacctccgcaaggaagggctggcgcgtgagttggtaaaccgtatccagaacctgcgtaagagcagcggttacgacattactgacaaaatatccgtcactgtcctttcgaacgatgggatggacgaggcgatcaaggacttcaattcctatatcgcaaaccaggtgttggctgtatcagtggaaattacggatgtgatcagcgacgcgaccgagatggatttcgaagacttcaagctttcggtccggatcgaaaaagcataaatattcaatgaataatgaataattaataatgaacaatggaagaattgcttatatttgtgggcaagagaaaaggaaatctttttcattgttgaattattcattattcattcttgattgttaattattaatttaaatgaaccatggcagaaaagacaagatattcggatgccgaactcgaggagttccgcgccataatattggaaaagctggaaaaggcgaaaaaagattatgacctgttgagatccggtgtcaccaattctgacggcaatgatgttgccgatacatctcctacgtttaaagtattggaggaaggtgctgcgactttatcgaaggaagaggccggtcgtttggcacaacgccagatgaagtttatccagaacttgcaggcagcattgatccggattgagaataagacatacggtatttgccgcgagaccggtaaattgattccgaaagaaagattacgtgcagtacctcacgctacgttgagtatcgaagctaaacagggaggtgccaagtaaatgagatattccaaaggttggggagcagcgttgattgtgatgctgctccttattcttgaccaggctcttaaaatatggattaaaactcacatgcagctgcatgagagtattgaaattactccgtggttttatttgtacttcaccgagaatccgggaatggctttcgggatagaagtgatcggtaagttgtttttatcggtattccgtattatagctgtcggctttatcggttattacctgtataagctggtgaaacagaattatgcctttggctttatcgcctgtatctcgttgatctttgcaggggctattgggaacatcatcgactctatattctatggggtggtgttcgatcatagttttggacaggtagcctcatttatgccggagggtggaggctatgccagttggttgcacgggaaagtggtcgatatgttctattttcctttgatacagacggtgttgcccgaatggattccggtgtggggaggagaggagttcatctttttccgtccgatctttaacttggccgattcggcgatttgcgtaggcgtctttttgttgttgctgttctaccgtcatacattgtcgacaagtctctcaaaagaaaaataaaagaattgatgcggaacaggctgcatagatatagatataatgtcgttttgttgctggcaacctggttggttgcctgtagcaaagtaccggatgacattctttcggaaaagaaaatgcaagctgtacaggtggatatgcaattggcagaagctatgattaacctggacagcaaggcgttttccgataatgcccgtaaggaggctctatatcagtccatcttccgcaaatacgatatcacacaagccgagtacgacagttcgctcatttggtatggacggcatctggatatttatatgaaggtgtatgaccgtgtgctggccgatttgaataaacggcagaaagcgttaggcgacgtacaggctttggctgcacctgtttccaaacaggattcggtggatatctggcctcgtcgcacctctttaaggttggagcccgatgctctgtttaacggtgtgacgttcgacatcaaaccggaaacgaactattcgtccggcagcacgtttgtgttggggatgaatgtctggggtatcaataaagggatggtctataaaccggaaatacgcataagtgctgatcagggcgatacgatcgtgactgtcaatgacaaggtgcttcgtgatggttatcatgaaaccgttttgaagacagttccgactaaacaggtcaaacgtgtgtacggttatatctttatgaacaatgccgattcttcctactacaaagtttatttggacagcttgaaccttatgaaatataattacggtcgtctgaccgatatggcaaaagattcgtctgccgtaaaaatatccacagcggaataaaaagtgttatgcgccggatcgcttcccattatatctattggagacagttctaccggctgcactatgtcgagttgaatgataacggcgtattggccggaattttccctttggaaggggaaattgcgggtacggagttctatgacggcatcttgatccttgtacctattcccgcgcttgacgcaggggtgcaggagaacaagcggtgtcatcaggattcttattctgacacatcttttgtaattccgagtcaagcgcgggaacagggcacttttgacatgctgccgggagaacagttggcagatgccttggaacgtcaaggttttacaggtattgctgaagcgggttcgcctgtttgtgtgctgttattgggcggcattcccctggcaacggcgaaattcggcgcagatgacagccgtagcgatggctacattcaaagactctgatgtttctctttcgggtggaaagcttggaatataaagtttttgattaatcaacttttctatttgcggacgtattccgttcccttcgttccccatcacgatgattccgtttgccgacaattcctttgtgtacatgttttctccgtcgaggaatgtaccgaacaacggaatttgtcttgccgcctgggctttcaggtagtcttccagttccgtgtaatggacttttacatgtgccagtgcgcccattgtggcctgcacagtcttcggactgaagacatctgcggtgtcggggctgcaaacgatatgttcgatgccgaaccagtcggcaaggcgtatgatggttccgagatttccagggtcctgtatgccgtctaaagctaaaacgagcgaggtagaaggatcggcttcgtcgagcgaccagtccgggcgcttgaacacggcaagtacatcctgcgggtttttcaagaaactggctttacggatgtcatccccttccgcttccaatagttctttcgccggaatgtttccctgcatcgccatccaggatggtttggcgagaatcagttcgcattcgaaagcaaacatcatgtcggcaaccagtttgtttccttcggcaacgaatgcattcagttcgttccgatatttcttcatttccaatgaatggatgtactttactttccccttgcttagcatctttactctttttatgcggcaaaggtaattggtttttacgatttatgatttatgatttgtgatttatgtgtcgttgataaatcataaatcataaatcataaaccacattttatttttacatttgcgtgcgtaaaaacttgaatgatgaagggaatccaaacactatatttcatttgtttcctattgttgttaatctcctgtagctcgacaaaatatgtaggcgaaggagaatacctgttggacaaagtggagattgtgtcggatggcaagacttataaaaacagcgatttgaagccttatttgcgccagcaacccaactttaaagcattcgggctgatgaaatggcagttgtttgtgtacgattggtcgggccggaacgagaagaaatggatcaataaacagcttcgccagatgggagaggctcccgtcattctggatacgacgctggtaacgcagtcggttgacgagttgaaacgtttctttatcaataaaggatatatgaatgccgaagtctcggcttctattgatacttcacgagtcaaaaaggctgtcgtgacctataggatcgtccctaacactccttaccggattcataattattcgatggatttgagcgatcctaagatcgatagcattgctaagctcaaaccgcctcaccgttccgtgctggcttcggcttttcgtacttattccgacgattatacttctctgataaaagacagtgccttgtttgaccgcgatgtgctggacaaggagaggcaacgcattacgactttgcttcgtcggcgtggttattatgctttcaaccgggattacctgtcttatattgccgatagctctttgaatcggaatatcgtagatttggatatgcttctgaaaccgtaccgtttgcagaagcctgacgggacggtggtcgacacgttacatcgtcagtattacattaaagacgtttcgattgtgaccgattatgacccgttgacgttagaggaaaacaacgctatgccttacgatacggttcgaactgacggtattgatatcctatacggcaagaacggcagaagtatccgtccgggagtcttgcgcaagagcaattatatcatgccgggacgcttgtataacgagcggacggtggagcagacctattcttcgtttgccacgctgcgtgctttgcgtaatgtaaatatccgtttttcggaggtcgaagagaacgacacgatgaagcttaattgtacgatcttgacttctcccgcaaaactgcaaggttttggggtcgatctggaagggacgaattcggcaggggattttggatttgcttccagtttgagttatcagcaccgaaacttgttcaagggctcggaggttttttctgctaaagtacgcggtgcatacgaggcgttgaccggcagccagtcggaaggaaacaacttttgggaattcggtgcggaagcatctgttttgtttccccgtttcctgttccccttcttgcatgaaaatttccgtcgtaagattcgtgcaacgaccgaactgaaggtgaactacagcatacaaacacgtccggaattcaaaagagccatcgtctctgcaggatggaattatatctggcaggagcggagcaatatgcaggcgcgccatgtgttcaagttgttggacattgactatgtgcacttgccgaagataagtcagtcgtttaaagattcgttgcctgaatctactttgctttacaattttaccgaccagtttattgtcggttccggttatacctattcttttaataattatgatcctcagaatcgtttgaggaatacgcattccgttcgcttctccttcgagatggcaggcaacttgctgtatgggctttcccgtctgactggtgcggataaggatgacgaagggcgctataaattgtttgggattaattatgcccagtttgtgaaaggggatatagatttcagtaaaagtatcgtgttggacaatcgtaacaagttggctttccacattggtatcggagtcggttatccgtatggtaactcgaagatgctaccgttcgaacgcagctatttctctggaggtgcaaatagtgtccgcggttggtccgtacgttcgctcggtcccggtagcatgccgctcgattcggtcaagtcctttgcccagcagatcggtgatatccgtctggatctgaatttggaataccgaacgaaactattttggaaattcgagatggcggcctttattgatgccggtaatatctggactttccataaggatgagagccgtccgaacggtaacttcgatttttcccgtttctacaaagagattgccgtctcttatggattaggtctccgcctcgatttcgatttcttcctgatccgtttcgataccggtatgaaagcctataacccgcaggaaagtggcagaaggaaatgggctatcctgcatccgaactttggcagtaacttcgcgtggcattttgcggtgggatatccgttctgattttatttccttctttatgtagttcgactacatatgaatttaggaggaaaaataacaaaaatatttgcttgttaaaataatattactacctttgcaccgcaaataaggatggttccgtagctcagctggatagagcaacgcccttctaaggcgtgggtcgagcgttcgaatcgctccggaatcacatgatttgaaaaaaatacctggtagattaaacatttaccgggtatttttttgtatactcagttgtgttttgtatggattactttttaccggacatatgtctcgcacaggcaatggcagtgaaaactgtttcgtagagatttaagttattgaacaatcggtcaggtcgatacctagtcaaataaggtgatagaaaatagccgtttgcgggttgaaacggaacgattatccctgttaagatgtttttcttgatcaaatctgctataattatatatctattgcttatatttacaacctttttgatagataagcttgtcgataaatatattgacttgtaacgtctgaacaatatctatttatttattccaaatacaaaaatgtattttttgcactgaagaagaaatgagaaaatggcgtattgaagactcagaagaactctacaacatcacaggttgggggacttcgtactttggtatcaatgacaaaggtcatgtagtggtaactcctcgtaaagacggcgccggtgtagatctgagagagctggtcgacgaactgcaattacgggatgtggaggctcctgtactgatccgtttcccagatattctggataaccgtattgaaaagatcgcgaactgtttcaagcaggcttctgatgaatatggttataaggcgcagaatttcattatctatccgattaaagtaaatcagatgcgtccggtagtggaagagattatcggtcatggcaagaagttcaacttagggttggaagccggttcaaagccggaactccatgcggtgattgcggtcaatacggattcggattctttgattatctgcaacggttacaaggatgagagctatatcgaactggctttgctggcacagaaaatgggtaaacgcatttttctggttgtcgaaaagatcaacgaactgactttgatcgccaagatggccaagcagttgaatgtccgtccgaatatcggcatccgtattaaactggcatcttccggcagtggtaaatgggaagagagcggtggcgatgccagcaagttcggcttgacgtccagcgaattgctggaagcacttgattttctggaaaagaaagatttgacagattgtctgaagctgattcatttccacattggcagtcaggtgaccaagatacgccgtattaaaacggctttgcgcgaagcatcacaattttatgtacaactgcatgcgatgggcttcaatatcgagtttgtggatattggtggcggactgggagtcgattatgatggtactcgttcttccaatagcgagagcagcgtcaattattccatccaggaatatgtaaacgactctatttctacaatggtcgatgccagtgacaagaacggtatcccgcatccgaatatcataacggaaagcgggcgttcgttgactgcccatcattccgttttgatatttgaagtgctggaaacagctacgcttcccgaaatggatgaagacttcgaggtgagcgaatctgatcacgagcttgtgcatgaactgtatgagatttgggataagctgaaccaaagccgtatgctggaagcctggcacgatgcgcagcagatacgcgaggaagcgttggatttgttcagtcatggtattgtcgatttgaagacccgtgcccaaatcgaacgcttgtattggtctgtgacgcgcgaaatcagccaaattgcttctgggttgaaacatgcaccggatgagtttagaaaactggacaaactattggctgataagtatttctgtaatttctcgcttttccagtccttgcctgactcttgggcgattgatcagattttcccgatcatgcctatccagcggttggatgaacgtccggaccggacggcgactttgcaggacataacctgcgactcggatggcaagattgccaactttatttcgacacgcaatgtttcccatgatctgccggtacattcgctgaaaggaaaagatgcttattatatcggtgtctttctggttggggcctatcaggaaattctgggagatatgcacaatcttttcggtgatacgaatgcagtgcatgtaacggtagatgaaaaaggttacaacatcgagcaagttatcgacggggaaacggttgccgaagtgctcgattatgttcagtataatcctaaaaagttggtgaggacactggaaacttgggtgactaagtctgtaaaggaaggtaagatttcggttgaagaaggtaaagagttcctttccaactatcgttccggcttgtatggatatacttatttagagtaatcccagtcgctgaattcaaaacttagttgttcccagcgggctttctcttcgttcttctcgtaaggattggagaccgaaagcccgatcaggcgaatcgggtgagtcgtatattcgatgtctttcaacagtcctttggctaaaggtagtatttcggctaaagtcgtcagttcgtggctttgggtgatgcttcttgtcttttggttgaaatcatggaatttaatttttaaagtaagggtatttcctttgaaaccggttcgttgcagccgttcgattagttcggtcgcaacatgatataattcgatgataacggacgattgctgcgaaatgtctttttcaagcgtatgttcacagcctacggatttgcggattcggacggcttcgacagggcgtaagtctatccctcttgaaaattcataatataaaattcctgcttttccgaattgtcgggtgagcatttcttgtgaacaagctctcaactgttctccgttatggatgcctaatgagtgcatccgctgggcggtgaccggaccgatcccccagaaggattcgatcggcagacgtttgatgaattcttccgcctgggacggatggatggtgcacagtccgtccggcttgcggtagtcagaggcgattttagccaaaaacttattatacgataccccagccgaggcaatcagatgcagctcctcccggattttttgcttgattgctttggctatgtcgacggcaagcgggatgttttgtttattctcggtaacatccagaaacgcctcgtccagtgaaagtggctcgacaatgtccgtatattcgtggaagatttcgtgtatctggcgggacaccgctttatagacatccatccgtccggaaacaaatgtgagctgagggcataggcgtttagccctttgtgacgacatggcggagcgtacgccgaacttccgggcttcgtagcttgctgccgctacgacaccccgttcctccgcgtggccgactgcaagcggaattccgcgaagttccggattatcccgctgttccacagaagcgtagaatgcgtccatgtcgatatgtatgatcttccgttccattaaaatccgttcatcggaaccaatactgtcggtatgagtaacaagaatccgactattactagaagcaatatgaatttccatgcccagcgaaaccatttatcgtaggggatacggctgacacccagaacggcgatcaacactcccgatgtcggggtgatcatattggtgaatccgtctccgaactggaaggccatcacggtcgcttgctttgacaatccaatcaagtcggagaaaggagccatgatcggcatggtcagggctgctttggcacttccggaaggaatgatcaggttgatcaaggtctggatcacgtacatcatgccgacggttgccacttgtccgagcccttccatccctttcgctaggttgtagagaatggtgtcgatgacaagcccttctttcagtatcacgataataccgcctgcaaggccgactaccaaagctgcgctcataatgtccttgcatccgtccagaaacagtttgaccagttcgttgggagtccggttgttggcgatgccggctgccagtccgagggcgaagaacagggtggctatctccatgatataccagccatatcccatcactcccgttatcagataaaaaatcgtgaagaagaggaggttcaggatataaagatggactgtcttgcgtagggcgaacagggaagtcaagataaaagcagctgttagaatggggaggagaggcagtcctttgataacgctgttcccgatttgtaaagttgttgcaggataataagcggcgaaaatgatttgtatgactaccaatataccgaaactgacccaagcggcacgtggcgtatgatagcttacatccagcgagttgttattgtgtaggtcccgccaatactgatcttcttcgtagactaacgaagctttcgggtttttctttactttagcagcataacgcagtatccaggagaaaccgatcatattgatgacaatccagcaaaatatccggtattcgattccggaaaagagcggaataccggccagcccttgcgcaatgccaattgtaaacgggttcagtatcgcaccggcaaatcctaatccggcggcgacaaagaccatgcaaacgcctgtaatggagtcataccccatcgagatcgccatcgggacaagtaccaggcaaaatgcgatggtctcttcactcatcccgaagacagccccgaatatgctgaatagtagcatgatggatgtcagtaagaaattctccactccgatcttgcgcaggaaacggttgttctccattttacgggcgcggccgaggaaactgacggttccgatatcgaaagccttactgtcgttgacgatccagaacgcccctccgataatcaggatgaagacgatgatatctgccttgtcgacaaatcctttgtaaaaagctgagaacacctgccaagtttgcggaacatgttctaccacttcgtagacaaccgttttttctccggcggcattgatactctctttgtattgtccgcccggaatgatccaggtgagggcggcacagaaaagaatgatataaaatatgatggcgtatgtatgtggaatctgtctctttttcataatccgttttcgttttcttcatccgttaatggacctatttcgggaaggatggcacgtgcctccctgtcgctgagggtgtctacatctttcagtttgcgctggatcacgcgtgtgcgtgtccctaatacctcttcgatctgtccgctggccgtctgcaagttcttctgtgctttttccagcatgccgcctaccttctcgaattctttctttaccgcccccaagatggtccatacctcgccggagtgtttctggatagcgagcgtgcggaatcccatttgcaggctgttcaggatggcggcaagcgttgtcggaccggtgacgactactttatagttgcgctgtagttcttccagcagggaagaacggcgtacgacctccgcatagattccttcgaaaggcaggaacatgatgccgaagtcggtggtggcggggggagccagatacttgtcggaaatatcctttgccatctttttaatagttgtttccaatagctttccggctgcttctatagcctgtgtgtcggcatgatcgtatgcatcgagcagctgttcgtagacgtctttgggaaattttgcatctatcggcagatagacaaattcgcggacatcgtcacgccccggaagtttgacggcaaactccacgacggcatccgatcctttgcgggtgtgcacattcgcctcgtattgctccggcgccaggatttgttcgagaagcatgcttaattggatttccccgatgttgccgcgtgtcttcacattgctgaggacacgttttaaaccacctacgtcttgtgccagcgtttgcatttctccaagtcctttctgtacgctttccagttgttccgtcacaagccggaatgattggccgatccggtcattcagtgtcttttgcaatttctcgtctacggtcaggcggatttcttccaaccgcttttccgtattggcaaccaacaggcgttgttgttcgtccaagttagcgaacttttcgcgttgcaaggcattgaaggaagtgatcccccggtcgaaagcatcccggaattcgttcatggagcgcgtcagttcttcccggttatccctggcgacgatgcggccttcttcccggttcagacgaaaatcttcccgaaagtttttttcgatacgttcaaatgaacgttgcatttcgtcgagcagccgtttcaattcgcctgcgatgtccgaatggtctttccgggggcggaaaaagacctgtaaagcaatgattacaacaagtaagcaaataatcaacccatccatttctttctattttgggtcaaagatagaaaaagagttatcgagagcagtaattaaaaagagttaaaaggaaaaacattattcagattcctttgtttaagttatacaaagcagcttatatttgtaagccgcttttgataaagaacataaaatacaacaaaagatggcaaagataacatttaaaggtaatgaagtcaatacgaacggttcattgcccgcagttggagcagaggctcctgattttaagggtgtaaagagcgatttatccgaattgcatctgaaagatttaaaaggaaagaaagtcgtgattaacgtgttcccaagtttggacactgccgtgtgtgccgcatcggtaagacgttttaataaagaagccgcttctcttcctaatactgtggtgcttgccgtatcaaaagacttgccttttgcgcaaggacgtttctgtaccacggaaggtatcgataaagtgatcccactttctgcattccgttgttcttgttttgaaaacgggtacgggatgctgatggtcgatggtccgctgaagggtttgttagcccgtggcgtgatagttgtcgacgaagccggtaaagttgtttatgaggaactggtttccgaaataacgaacgaaccgaattacgaagccgcaatcgcttcattaaaaaactaataaagtagattattgtttttcattggttaaagttaagggttagtgtagaaggccgccggatgtgaatcccgcggccttcgttttttataatcctgaccagctcatcgttaatttggcaattgtcttatggcttagttttgaaacaaaatcggcggaggtattggtttgggttactatcatggctatgcattcccaatctttatccgcttacgacgcctttcaatcgaagatttgaggaaaatagaatatatgtaccagtatcaaagatattaaagtggttcacagattaacttgtaaccgattcctcttacgttcaagatcttgatgcgagagtctttgtccaatttgtggcgcagcttggtgatgaaaacatgcaggctgcgtgcattataaaagctgtcgtctccccataggctcagcagaatgtccttgctgtagatcggctggttctcgttttcgcataggcgtttcaatatttcggattctttgtaggagagtttgtcgctttctccggctatcagcaaggtctggactttcgggtagaaagtgtaaagcccgatctcgtagaattcggttcttccctcctcctgtttatatttgatcaggagggctttagcgcgaacgaccaattcacgcagactgaacggtttgcgaacatagtcgttggctcctaattcgaagccgaagacgatgtcatctgttgaagaacgggcactcaagaagagtacaggcacttctttattctccttccgtatccgccggatcatttcgaacccgtctatttccggcatcatgacatccgcgataatcaggtcgggagcatacttgtagaaacgatcgatcccctgcaggccgtttcctgccgttatgacttggaagtcttcttcttccagtgcatctttgatgatcatggacaggctcgcttcgtcttcaaccaataatatcgatttcttgtctttcatgtgtttgcggtaatgtgattatgaagcaacttccctttccgggctggctttctacccggatcgtaccgttgtgcatgtgtatcattgtcttgacataaaacagcccgatgccgtaccctcttacgggaggtcgcttgctgttggaaacccggtagaatttatcgaagatatgtgccaggtgttcttcttctattccgatgccgttgtcggtaatgcggatgacgaccgaaccgttgcgctcttctgccgttatctggatgtgcggactatcaccggaatatttgatggcattgtccagaatgttgctcaagatgttgtaaagatgtgttctgtcggcttccagtataatcctgtccggcatggattccagcccgacatgaaagggtttggaggatttgatgctctgttgttcgacgattttatcgagcaacccgttcaggtctactctttcgtatttaagtttgaaatcctttttacgttccaggccgagtgaaagaatttgctcgaccatattgccgagacgtagcacttcctcgtgacagatatgcaagtatttgtttgtcttttctttgtttccggttatgttgtaatggatcatggcttcgattgctgcataggtgattgctatcggggttttcaattcatgcgtgacattgtgcgtaaagtcatctttcagttgttccactgtcttttggtggatcaggaaccagaacatataagcgaaagagaggatcaggatcaacaggatcaggaatgaagagaataggatgcccgacatcatccggatcgtatcccaccgggttggttcggtataaaccagataagcccttttatgataggtcgtgtattcccatttgtgtaggtcgtattctgtcttgtccaggtctgccggaacggatgaggcgatgatcgaactgtcttccagattccacatttcggtatgatggcgaatatccagccccctcttttgcaggtgggaggacaggatgctgtcgaactttgcaaggtcgaccggtttgaccgaatcgatcacttcatgtagagcttgctgcatctgtaagcctaactctcctaacgacctgaaatcgttaccgacctccactgccgtgctttttagcattttacccgcttcgttacggagtgtctggctccggtatcggggatgatagatattcgtatctaaaggctgcacgctcagttcgggaataaccgaatccttgtcaggaaaccgggtactgagagccgcaccgcctttcgtatcggcaatggcggatgtctctctttgcctgtgcgtgaccctgctgaggaaatcggcccgattgaacagttcgatatgatctgcatttttgatcgccatccggatctcttcctggttctgcttttgccgtgagtggtagaggccggttatccagaatagctgatagatgaagaggccggacaacgacaggatgaccagaacgattacatatttgaacgaagatttcatgtaaacaaatgtagggaaagtttatctgatccggtttatttggtaagactaaataacattcgtgcggggggatgttatatagtcttaccaaaaagaggcaaagtttggaactctcgtttccgaatataacctttacaagaaaaaataatacgatgaagcatttctatcattatttgttgaccgtttttctggcagggcaagtacctggatgggggcagaacgcaacggaaaagaaacacatcttcgtgaacgacagtataaccgtagatcttccggaggtgtttgtaaaagcggaacggccgttggtgaaagtgtcggaaggcaagttgcagtacgacattccgaacctggtaaaagataaaccggtcgataacgcttttgatgtgataggcgaattgcccggtatacaaaaagatggggataaggtgtcgattatcggaaccccttcgacctcgatcctgatcaacggacgcaaaagttcgatgacagcggaacaattggctggcttattgaaatccacatcttcatccaaagtaaaacaaatagatgtgatgtatagcacgcctccccggtttggcgtgaaaggtgcatccatcaatgtcgtaatagaaaatgacaaatctttgaaagacgtgctgaagggggaaatctctttgacgggtaagcaaggttatttcttttctccatccggtcaggcgaacctttcgtatatcgggaagaattactcggctgatatctcttattcggccgcttatgatcatggacgccaggaagaggaaatgattgcccgaccgactgtaaacgatcgcccgtacgatattaggcaggatgactggtataataatgtaagcctttctcacaatatacggggagctttcgatttcgatttgaaaagtaaagaccgcttgtcactttcctataccggccgtttttacgacccggataaagtatcgagaagaggcgcgttgaccgagtttgtcgatatccggcgggtagagacggagctggaattgtccggcgcttcgaatctgcataatgcccggatggattatatcggtcataaagggttcagagccgggatggattatactttttataagaatgacgacaagcaacatttggttaatgactttgaaaaagaggaagagcagacaatctcaactctgtcttcccagcaggtacaacgtgttgatctttatatgaacgacagtcgtaaattgaaaaaagaatggatgttggattacggagtagatgcttctttttccgatacccgtaacgagtccggtcagtcgatcaatggtggaaatgctcctgaaggaactttccgccttaaacaaaaagattattcaatgggtgcttttgccggttttacgaaacaattcgggaaaaaggtttcattgaatgcatccctttccttgcagtattataaagcatccgtcgattcggcaggaaagaaaaagacattatggaacagggccggccttttccctcaattgaattttacttacaaggtggctccgtccggtatgctgatgttttccttttcgagtgataaaacctatccgtcctattggatgactactcctactacctattatatgaatgtctacagttctataatcgggaacccggacctgaagccgcagctctcttattcgatgcaactgaattatgtcctgaagagcaagtatgtattcggcttatttacaaatatacagcccgataaaatacaacagatgacgtaccagcgccacgatgagttgaggtccgtattccagacagtgaatatggatatctacaatatgtacggagcggtcgccgtcatccctttcaggccttttgattttatgagttccaggctgacgctgatgggctgtgccattcataacaaagggacgctttatgatgtctttttcgaccgtaaaaaactgtttggccgggccgaattgaacaataccttctacctgaccgaagaccggaacttgttgttggagttgcggggctattgtatatctccggtcatacagggattgtatgatgtcgatctgatatacaacgtgtcggccggtctgacctggacattcgcgaaaaagaagatgcgcctgacggttcggggtaatgatttgttcgagggaggcaatcccgttacccgtgtggatgaacaggggcagaaaagccgcatgaaactgtggcaggatagccggaatgtgacactgacattacggtatagtttcggtggctacaaagagaaaaaggcaaaagaggtagacacttcacgtttggggacggggatttgatatgcttgctgtccaaataccgggatgaatcaactgatggcggaaatgttgggaggtatagtaaataagtcttgaagaacaattgtttgtgttattatattttatacctttagcgctgacttgctaatgctatcctgtacctcttagttagttatcctgtacaccctggtaaaccatcctgtacaccttgaccgattatcctgtacaggctgttgttactgagtggttactaataagatagaggatggtaacctttgagataaatcgtgttaatgttaaatctaatagaaagataatagtatggcggtaagatacaagctgacaaaaatcaatgacaatattactgataataagacggtaaagtattcggtaacgacggtaagctatgacaatgtgaatttggatgctttagccgagcaaatagccggatccagtacattttcctacggcgaagtgaaaggacttgtggaaaatctgactattctgattgcggaagctctggaaggcggcaataccgtgacgatcgacggtttgggaacattttccgtaactgcccgacccaaccgtgaagtggaagatccgttgaaaatccgtgccgagtctattaagctgaaaggaattggcttcaaacccagcccgaaactgaaggagaggctgagaagtattgagtttacgaggatgaaataggttttatacataaagtttacgggaagtatttgccatttgcaatcttaccaggtaataatttgtataatagtttgttattccattgcaaatatctttttgagtttgcaatggagtttgtcattagtcataaaacaaaagttgcacaaatgagtccggatatgaaaataacacaagtgaagagtaatggtaagtctttgaaaaatatagagttgccagatgtgatgactgcgataagatccggcgaacaagccagggtggtgaatgaacatcgggggatattatcctcttcaatgcctggcgatcggaacattcatgcgacggatattcctgttttgctttttgccgcccggttcaggaagaaagaaagcaggatagagtatcaggcgtataacgggctggtgctgatggatgtcggcaatctggcggatagggaagaggccgtggaggtgaagcgactcgcttccttagccccgcagacaatggcagcctttgtcggttcgagcgggaagagcgtgaaaatactggttccttttgtgttgcccgacggttcccttccggaaaagagggagttggccgagttgtttcatgcggtggcctacaggcgtgcagtggccttttatcaggctcatctgcaacgtcatatagagatgggggaggaggcatcgttggaaagaggatgccgccattcttttgatcctggtttatattataatccgtcggccacaccgttgattcaggagcaaccgatgcagatgcctgccgaaccgacctatcgggaggtggtggccaaagaggaagatccgcttttgcgcatgatgcccggatatgaccgcagtcgtatcgtttcccgtttttataatgcctgtatgttggacgccctcgaaaagacgggtggtttggatgaaggaaaagaggtcaggcctttcctgacaaggttggctgaaaattgttttcgctccggtattccggaagaggatgtggttcgctggacaaagattagccggaatctcgaactgtttgaagaggagatccgggagacgattcacatggtgtaccaactgtcgaagtgtttcgggaagaagccggtgatgcctgccgagcaactgctttcgataaagacggacgagtttatgaaacggcggtatgagttccggcggaatatgctggcaggcgaagtggagttccgggcaagaggttcgtactatatccattttgccccggttaccgaaacggttctaaatagcatcggtctgaatgcgcaggccgaagggctggctctttgggatcgcgatgtgaagcggtatgtctattccgacagggttccggtcttttatccgttggaagattatctggaatatttgccggagtgggacggtaaggatcatatacgtgcactggccgacacactgccgaccgctaatgcccagtggcgcaatctgttttatatctggttcctgagtatgaccgcccactggtacaggcgcgagcatttgcatgcaaacagttcgttgcctttgctggtcggcccgcagggatgtggcaagtccacctggtgtcggaatttgttgccgccttcgcttcgtatgtattatacggatagcattgatttcagtaacaaacgggatgccgaactgatgctgactcgttttgccttgatcaatatcgatgaatttgattcggtcagttccgcttaccagagctttttaaagaatgtcctgcaaaagccggttgtcaacgcccgccagccttataagcgaagtattcaggcattgcaccggtatgcctcttttatcgcgacctgcaacaattacgatctgttgaccgatccgaccggaagccggcgttttatctgtatcgagatctccggtacgatagataattcaacatcgataaactatgaacagttgtatgcccaggctgtagctgctttaaagaatggcgaacgttattggtttacttccgaagaggagttctcgacaactcgtaacaatgaagtattccagcaactgcctgtcgaagaacagttgtttcttcagtactttcgtgccgcccggccgggagaggagagtctggaattatccgccattgaaattctccagtatctacaaagtgaaagtggcattaagttgggcaataaacggttgacctacttcggccgcctgctccagaagaataagatcccttcacgccgcacgatgaaaggaacttgctattcggtggtgaaggtggaataatgtagggtgaataacaaatgttattgcaaatgaaaaagagtttgcaatgaagtaataggttgttatatagttacttataggtcgctattgcaaatggcgaatggatagcggaaaattgttgtatgattgaagcataagcgtaatcatgttgtttataaagtaatctgtaactttgtcgccaaagttaggaataagctttttaatatagatgatgaataatgaataaaaagatacttcagttagcgcttccttctattgtttccaatataacggttcctttgttgggattggtcgatgtggcgattgtcggacatttgggggccgcttcctatatcggggcgattgcggtaggggggatgctgttcaatattatttactggttgttcggtttcttgcggatgggaacgagtgggatgacttcacaggctctggggagacgggatctcctggaagtaacgagggttttgttccggtcggtcggtgtcgggattctgatttctctggctctgcttctgctccagtatccgatacgggaaatagctttcttactattggatacgacggatgaggtagaacggttggcttccttatatttcaatatttgtatttggggagcgccggctgtgttgggattgtatggtttctccggttggtttatcggaatgcagaattcccgtttcccgatgtttattgcgatcatccagaatgtcgtgaatatcgtggcgagtctgatcttcgtctttgtgttcggcatgaaggtgcaaggggttgcgacgggaacgctgatcgctcaatatggaggcttcgggatggctgtattcctgtggttcgtattctatcggaagcggttgaatattcgtgtttgctggcatgagatcatggataaggtcgctatgcgtcgcttcttccaggtgaatggcgatattttctttcgtacgctttgtttggtggcggttactacattttttacatctacgggtgcgaggcagggcgatatcgttttggccgttaatacattgctgatgcagttgtttacgctcttttcctatatcatggacggttttgcctatgcgggcgaggctttggcgggacgttatatcggtgctcggaacaaaacagcccttagtcggatgatccgtttgctgtttggctggggaatcgggttgtccctttcgtttaccttgctttatggagtaggcgggaaaggttttctctccctcctgacgaatgactctgttgtcatacaagaggccggaacctatttctattgggtgctggctgtcccgcttgccggctttgccgccttcttgtgggatggaatcttgatcggtgcgacagctacccgcctgatgctttattcgatgttggtcgcttccggcactttctttttgatctattacctctttttcggaatgatgggaaatcatgcattgtggatggcatttctgatatatctgttgcttcgtggtagtatgcaatgggtattatggaatcgccacaatgaattagtgtaatcggtcgtatgcccattgtgccggattgtttaatatataattggatatattatgatacgccttttcatcctgtatgatatgttcataataattacgttgccataatttttgaccgtgtagattaatcatttttgtcgattgatatttaaaatatcccacaatatgccccagtgtcaccacgtaggggcggggttcgcccgccctaaatgcatcccgatcgatttttataatcgcatggaaatgatttggcataataacatattcgcaacattcgatattggggtatttgtgttccaaatcccaataacattgttggattatttcaccatatgggtttaatatcatttataacccttcctgtgaataatcatatcctttcaaacggatactgtgacgatggtggatgtctggattgtactgtttcatagtcgatggttgtcttattggcttaatacgagtctaaatataaggaaaaagccggaaatcaagagaagatatccggcttttatgaaattagatacgctctattattgtctgtagcttgctaattcgtcggcattgaatttcaagataaagctgctgtgtttttccacttccgcttcgacataattcaagtatacgacagctgatttggcaaacatttcaggagtctttgtcgcgtcttggatcagcaggtgagccatgatgcagtcggctgccatttcataaaggcgacgggcaacaaagtcctgcaattcctggttctgcgcttccttcaccttgttcatgcaggcttcgaacttattggccatttcaaccaggcggcctttcagcggttccatttcaggagaacacgggattgtttcgaattctcggatggtagccagataggaaccgttggtcacgtaacggatggctgcaactgtctgcaattgcgtcgtcccctcgtagatggaggtgatgcgggcatcccggtagatacgttgacaagcatattccagcatgaagcctgaaccaccatgaatttggatacagtcgtatgcgttctggttggcatattcggagttcataccttttgccagcggggtgaaagagtcggccagtttggcatattttttctgttcctgacgttcttccggagtcagcttgcgttcacgggcgatgtcgtccagtgctttgtagatatctacataacgggaagtctgatacagtaaggcacggccggcatccagcttcgctttcatgatagacagcatgtcgtaaacagccgggaattcgataattgctttgccgaactgtttgcgttcctttgcgtaagctaacccttcgttgtaggcggcctggctcagaccgacagactgtgcggcgatacccaaacgggcaccgttcatcagcgccatcacatatttgatcaaacctaatttgcgatctccgcaaagttcggctttcgcattcttgtaaaccagttcgcaggtaggcgaaccgtgaatacccaacttgttttcaatacggcggacatctacgccaccctggcgtttgtcatagatgaacatagacaggccacgcccgtctttcgtcccttcttccgaacgggccaagaccagatgaaggtcggcgtctccgtttgtgatgaaacgtttcacaccgttcagacgccagcaattttctttttcgtcgaaagtcgctttcagcatcacggactgcaagtcggaaccggcatccggctctgtcaagtccatagacatcgtttcaccggcgcagatacgcggaatgaaacggctgtgctggtcttcgtttccgaattcatataatgtctcgatacaatcttgcaacgaccagatgtttccgaatccagcatcggcagcggccacgatttcggcgcacatggtgtacggcgtgatcgggaagttcaaaccgccgaaacggcgcggcatcgtcataccgttcaggccggctttcaccattgcatccagattctgcttggtcccggaagcgtattccacacgtccgtttgcgcagtgggggccttcttcgtcaactccttcggcattgggagcgatgatctcacccgtgatttcgcctgtgatttcaagtactttgtcgaacgagtccattgcatcggcataatcctgcggtgcatagtcgaactcttctttatctctgtaattgcgttctttcagttcgcaaatacgttccatcatcggattgttcaagtgatacttgagttccggaatgtctgtataataatttgccatctctttacttgctgttctgtttgtaatacttaatcatcttcggaatcacctcctcaacagtgccgttgatcacgtagtcggcaatcgtgttgatcggagcgttctcgtcgttgttgatagagatgatgatacctgcatcctgcatacctgcgatatgctggatctgtccggagataccgcaagcgatatacaatttcggacggaccgtcacacctgtctggccgatctggcggtcatggtcacagaaaccggcatcaacggctgcacggctggcgcctacttcggcatgaagttcctttgccagttcgaacaacatatcgaaactttccttggaacccattccgtaaccgccggctactacgatcggagcacctttcaggttgtgtttggccttttctatgtggcggtcgatgacctttacgacataatccgtttccggaacatatttggcgacgtcgtgttttaccacttcgcctttataaccggcgtccagaatttcttttttcatcacaccttcgcgaacagtcgccatctgaggacggtgttccggattgatgatcgtcgctacgatgttaccgccgaaagcgggacggatctggtataacaggttttcgtatgttttaccagttcttttgtcttcgtgcgagccgatttcgagggatgtacagtctgctgtcagaccgcttgtcagtgcagaagaaacacgggggcctaagtcacggccgataaccgttgctcccatcaggcagatctgcggtttttcttctttgaacagattgatcaaaacagaagaatgaggaagggaagtgtacgggaacagaccgggagcgtcaaaaatatgcaccttgtccacgccataaggcatcacctgcttttcaatcccttccagtccggaaccggccacaatggcttcgagttggcagttcaactggttggctaacttgcgacctttggtcagcagttcgaggcttacatcggcaatcgttgtaccttcaagctcacaatatacaaatacattattcatattgttcaatcttttttaccgtatgaattgtcaattatcaattgtcaattatccgatagtgtggttagctaacagttcaacaatcaaatcttccacatccttgtctgagctggtcagcgtcttgctttcctttgcctggaacacgatgttctgaatcgctttgacttttgtcggcgaaccggacaaaccgcattgtgcgagatctccgtttacatcggcaacactccattccggaatattcaggtacgggcgcttttcatacagttcggggtatggcagtgccgatacgccttccggatggcaggcgggagcgggaactttttcctgcgcgcccaatgcccgtttgtatttcatcaccaacttggcattacgcggacggcagggggcagccgaaccgttgaccgtaatcacgataggcagcggaccttccactgtttcgacaccaccgtcgatatgccgtttcactgtgatactgcgattcttttcgtctacgttcaggatttcttcggcatatgtgacctgtgttaatcctaacttttcagcgacttgaggacctacctgtgctgtatcgccgtcaatagcctggcgtcctccgatgataatatcgtagtcacctattttcttgattgctgtggcaagcgcataagacgttgccaaagtgtcggcaccggcaaatgcacggtcggttagcagataaccaccgtctgctccccggtataaaccttcacgaataatttcagctgcacgccccggacccattgttaacaaggttaccgtagttcccggataggcgtctttcaagcggagggcttgttctaatgcgttcagatcttccgggttgaagattgcgggaagtgcggcccggttgatcgttccgtcctctttcatcgcatcctttcccacattgcgtgtgtccggaacctgtttcgccaatacaataatttttaaactcatattataggaatattagatttctatattggatatttgttcgaattaaccttctgaatactgacctgcaaaagtaatcaaacattctttatatcaaagaactttcgtctggaatctgcacactttaggtttttttgagcatatcctttctttttacttaccaccttactaatcaccataatttaggcacggattacacggaaaacacggaaagaaaataaatttatccgtgtcaatccgtgaaatccgtgcctgaaagatcgtgataaaggtgctttggcaccgtcttgtcaagtcgaaatcgagtaataggtttgcgccggtttatattaaatttcgcatgcacaaagtgttggaatcaggttgcggtcgccatacgcattgtctacgcgggctacattcacccagaatttgctgtcgtgcaaccattccagcgggaaggcggccttgctgcgcggatactcgtgtttccattcgtcggccgttacttcatattcgggatgaggagcgttctttaatacgttgtcttcctttgaagccttgccttcttccacttccttgatttcgttccagatacattccagcacctcgacgaaacgatccagttcggctttgctttcgctttcggtcggttcgaccatcagagtgccgtgaacagggaaggaaagagttggagcgtggtagccgaagtccatcaggcgcttggcgatatcgccttcatcgatacccgaacgttcttttaccgtgcggcattccaggatcagttcgtgaccgacgcgacctgtagcacctgtgtaaacgattccgtaagtatctttgaatttggctgccagataattcgcattcaagatcgcggtcttggtgaccgtttccaacccttctgttcccaacatgcggatataagcatatgtgatcggcagaatgcccgcgctaccgtaaggtgcggcggagactgtgttcaggtcgctgccccataatatcggatgctgtggcaggaacgggacgagatgtgcggcaacgcagatcggaccgacaccgggaccgcctcctccgtgaggagaagaaaaggtcttatgcaggtttaggtggcagacgtctgcaccgatagtacccggattggtcagaccgacttgtgcattcatgttggcgccgtccatatacagctgaccaccgcaagcgtgaacaatgtcgcacatttccttgatgtccacctcgaagataccgtgagtagacggataggtgatcatgctggctgctaagttgtccttgttggcttcggctttagcccggaaatcttccaagtcgatatttcctttgtcgtcacatttcaccgtaacggtcgtaaaaccgcattgaaccgcacttgccgggttcgtaccgtgggcagaggcaggaagcaggacgatgttgcgatgtccctgcccgatgctttccagataagcccggattacgcgcagacctgtatattcgccggctgctccggaattaggttgcagcgtacagcctttgaatccggtgatctcacacaagtaagccgataagttttcaatcagttccgtgtagccttcgacctggtcttccggtgcatacggatgtatattcatgaattccggacggctgagtggaagcatggtcgatgccggattcagtttcatcgtacaagaacctaaagagatcatggattgggccaatgaaacatcctttcgtcccaggcgggtgatataacgcatcagttccgtttcggtatgatattttttgaatacgtcttcttgcaggaattcggaagtacgggcgaatttcggatcgaaataagttttctcaggaacggcttctttcagcatgtagtcctttccggctgcccctgcgaagatatacagcaatacgccgatatcggtcggtccggtcgtttcgtccaagctgatgccgatctgtccggcatcgaagtaacgcaagttcaccttacattccaatgcgatctcgcggagtgcattgatggatacatgttccggcaactggattttcagtgtgtcgaaatagtttttgttcaattgtttgtagcctagtttttccaactcgcctgttaggaaacctgcagaagcgtggatacgacctgcgatgttcttcaagccttcggcaccgtggtaaacggcgtagaaaccagccatcgtggctagcaaggcttgggcggtacagatattggaggtcgccttttcacgtttgatatgttgttcgcgtgtttgcaaagccaagcggtaagccgtgtgtccataggcatctttggaaatgccgatgatacgtccggggatggaacgcttgtattcgtctttcgtggcgaagaatgcagcggacggaccaccgtagaacatcgggataccgaaacgttggctgcttccgaacacgacatctgcaccccattctcccggaggagtcagcaggacaagactcatcaggtcggcagcgacggcgacacgtgctccactggcattggcacgtacgatgaattctttataatcttcgatcgaaccgtcggcattcggatactggacgatagccccgaatacatccggtgtgaattcaaatgttttgtaatcacccacaacgaccttgatgccttgcgggatcatgcgagtgttgataacggccagtgtagaggcgaatacgttttcgtcgacaaacaacgtattggcttctgctttcacctgtgcacggctacggctaccgtagaacatggttgccgcttcggctgctgctgtcgcttcgtccagcagggaacagttggctagcggcaggccggtcagttcagcgataacagtctggaaattcaacaaagcttccagacgtccttgtgaaacttctgcctggtacggagtgtaggaagtgtaccaaaccggattttcaaatacgttacgttggataggagccggacatactgtgtcataccaacccattccgatataagaagtgaagacttcgtttttagatgccaactccgagatgtgttctgcgaactcacgttccgtcatggggtcgggaaggttaagcggttctttcaaacggatgtcggacgggatggtctgatcgatcagttcgtcaaccgacttgacgccgatggcttgcagcatggaaggaatgtcttctgccgagataccaacgtggcggtttacaaatttatttgtgtccataatattgtgatttatgatttatgaattaattcttaattgtcaattacaaatagggattgttgaacttctcatcgatgactcttgtttccggtccatgccccggatagattactgtctcgtcgggaagtgaaaggagtttgtcgtggatggcggcaaccaatacctcctggttgccaccccaaaggtcggtacggccgatacttccggcaaacagtgcatcgccgacgatcgcaaagccgttctttttgttatagaaagcgacgctgccgggtgaatgtccgggaactgtcagcacttgaagttcggatgtgccgaacttaatgatctcgcctcctacgatatatttttcaaccgggacgttctcgacatgctgacggagtccgaacaacttggcctgttcgtccggagagggtagtttctcgacatcctgcttgttcgcttcgggtttcaaaccgtatgtcttatatataaaaccgtttccaaatacgtgatccacgtgcagatgagtacagagcaaatgctttaatgtcaacttgttttcgaggataaagtcggttaactccttttcctcttccttgcgacagcaaccacaatcgatcagtacggcctcgcgtgtatcatcatacagcaggaatgtgttttcctggaaataattgaactcaaacgattttattgtaatcataacggtacgtaaacaacttttttagtttggaaaaattcttctttaaaatggtcactcaggttgaggctgacagcttgcttgtggaatggcaatatttcatgctgcaactctcctcctttcagacaaatcaaaccgttaggaagtgcattttgttgttccttctttatattcttacgggcgatttttaccagatcggccagtggcatgacggcacgactcacgacaaagtcgaataattgtttttcctcttcggcacgacaatggcggaaagtgacgtttttcagaccgatcgcttcggctacagcttgtccgaccttgattttttttccgatactgtctaccaaatgaaactgtacttcagggagcaggatcgcaagtggtatgccgggaaaaccgcctcccgtaccgatatccataattgtcgatccttctctgaatttcagcattttcaagatacctaacgaatgaagtacgtggtgcaggtacaggttctctatatctttgcgtgaaattacattgattttggaattccagtctgaatacaaatcaaacagggcgtctatctgttgcttttgcgcatcggttagcgttggaaagtaagactttagaattgacaattgacaattgacaattgacaattgggaggatattgttgcattgttatccataaattatatgtataggattattgttatattttatttgtcaattgtcaattagtttcgcgatcggactgtcttttttcaatagatataggatttccgtatagggcaagaatacgtttgtttcccttaccacgtaagcggcgatctcatattcattaaaggtatacgtgatgccgtcctcgtcgaccaggaaattaccgttcggaaaaatttcttcgacactaaagaaaccgatgttttccaaatctttcggattctccaccttgttttgtttggcaatatgatcgatcaatatctgtgcgaggctgtcctggaagttctcgatgaaaatatcttcttctgtgattgcattgcctgttttcaagttgatcacatgattgttgtaggcatgcgaaccgtgtgcaccgcctgtatagttttcgaaacttacagtatagctcagaatgtcattctggttgtagacgatttcatccgatgacatttcgaaataagagaaccaggctccgaccggcagatcgtccttcttttccaactctgccttgaaatcggcttccagttctttatagttgttcagatagtcttccgtgtacttggcgaccgcctcttctggagacaggttctcataattctcgccgaagtaggagaggacaaagtcattctgtatctttttcagaatctctttatcggaaaatttggcaggataggtgaagttcaattgcaggttgcaattgggattatcgggattattcagcagatgataggtcctatccacccggatagaatcgaatttaatatcattatcggccgtttgcttcgtgttggtattgcaaccggttacgaacattcctaaaaagaaaagtgctatcaggcttttactaatttgtgtactcatcggaatcatagattttagataatacttttagatgcaaatgtaagctattatcttgtaataaacgaatggctggtttcttttttcagcctcggaggcatcaaaagggtgaggagatagcagtgctggtgttgtttcctacctatgtaacggtcgttccctacctatgaaactactgtttcctgcccatgaaacgggagtaccatgccagtggaactcttgtgccaataaaatgtaacaggcttggcactgcgttctggcttatcatccggaaaaggaattctgcttggcgaaggttgagttgtaataaatgttttaaacgaaaataaacgctaattaggcaaccttttgagaaaaaggttgcctaattctatttgtgaaacgaacaaatcccctatatttgcagagtgtgtacgcacacctctttgaaccatgtaaaaaataacaggtaacaaatggcttattctaactattatgcggcttctgggcttttccatggatctatgtcgtcggtaatgggaacgcagtttgacatcttgatggtcggcagtgatccccgccttcttggtacggtctgggaaaaggtcgaatcggaagtgcagcgattagataaaatgctgaaccggttcgatccggagagtgaggtttcatttgttaaccgggaagccgggcactacccggtgacggtgggggaagagctttggaatatattgttgaactgcaagcgttacaatgagctgacggaaggatatttcgatataactttgcagggattcgaccaggtattgctgacggaagaagataaaagcatttttttcttttctgaatctttacacattgatctcggcgggtacgggaaaggatatgcgcttgctagaatacgggaactgttggaagaaaacgggattggtaaggcgcttgtcaatttcggaaatagttcggttctggcggtcggtacgcatccgtgcggcgaatattggccggtgggtcttgacaatccgtttacgaaagagcggattgccgatttgaagttgagtgatagttcgttatcgatatcgggaaatatgccttcccatccgcgccatatcgtgaacccgcatacgggaacattcgtggaggataagaaaatggtgtcggtggtggcgaaagatccggtggtggcggagattctgacaactgcctttatgatctgcggcgacgagcgtgttccggtaatcgcgtctcaatttgatatttatgaaaaacatgtatataagttatgaaaaatgatgagaattcagtcaatttaagccggcgagacttctttaaggagttgggaatgattggtggaggcggtgtgctgctttccgcgtttccctggttgcagtcctgtagtgccgacgataaggtgcagatcgcaaaggagaaagtgcggatcggatttattggtacaggttcgcgcggacagtaccacttgaataacctgaagacgattccgtatgccgatgtggttgccttgtgtgataattatcctccccacctgaaagaggcttcggctctctatccgaaagccaagacatatgacgattaccggaagcttttggatgatagagatatacaagctgtcatgatcgccactccgctgtacgaacatgcgcatatcacaatagacgccttgcatgccggaaagcatgtcttctgcgagaaatcgatggcgatgacgtgtgctgactgtctggatatgtataatgtgtttaaggaatccggcaaggtgatgtttatcggccagcagcgcttgtatgatccgaagtatataaaggcgatggaaatgatccatgccggtttgttgggagagataaattcgatacgggcgtattggttccgtaataacgactggcgccgtccggtcccttctcccgatttggaacgtaagatcaactggcgtttatataaggaatattcatgcggcttggtaacagaattggcaacccatcagttgcaggttggaaactgggcgctccggatgcttcccgaaaaggtggccggcatgggagatatcgtctattggaaggatggtcgcgaagtgtatgacagtatcaatttgatttatcattatccgaatggtgtgaagatgacctatgagtcgatgattgccaacaagttttatggccttgaagaagagattatgggaagcaagggcacgatggaaccggaaaaaggtaaatattattttgaagatgtcgaacctgctcctggtatcatgcagttgatcaaccagatcgaacataagatcttcgacaatgtttcatttgccggcccgagttgggttcctgaaactgcatcggtaaacaagggacatctgatcatggacaatgtcacaacgatcagcggacagtcgtcggtaggagctgctggcgacggttctatcgagttggttactgctttctgcgaagcggctattactggaaaaccggctcctaacctggtggaagaagcttactattcctctgttttgggtttgttgggcttgcaggcgattgatgaaggacgggtgattactttcccggatgaatataaaataccgtatctaaattttgcatgattatgaaagagatcgtattatctgtaaagagacaaaaaacggaaatcaagatattctgtgtctgtatcgcgctcgcttatctgatgaacattatctcaatcatagcatacggtacaagctggtccgagctttggacacaatcgttgtggatgctactcattacgtgtggcttttacggattgtcggttgtactccgtttgctgtattatggactgagccagttgagaaagtgattgttgcttttctttagaaagagaagtaaccaaagaatttaatatcgttctattgttttttcatcaggagaaagtgatagaacgatttttatatgtttttgattgatttcttatcatgtttttctgtcataatcctttcctttgcccaataaatctgataagcatgaaaaagacgattttatttttctcaattctgttggcgtcgtgtgcaggtaagcagacgcaagagatccggacaatggaacgtttgtccactgcatctcataatgattactatgtaagtaaccgggctccgttgcaaccgttgcaatttattaagctgcccgccggaagtatcgagccagaaggctggatcaggcgacagatcgaattacagaaggatggactttgtggtcatttgggggagattagtgcctggctgcaaaaggaaaacaatgcctggttgaaaaacggaggtgaatgggggtgggaagaagtgccctactggttgcgagggtatggtaatatggcgtatgccttgagagacgaaactttgttgaaggaaacgaaattctggatagaggccatcttgtcaagtcagcgggcggatggtaatttcgggccggtgcatttgaataacggcaagcaggatttttggccgaacatgatcgtcctttggatcatgcaatcttatcatgaatatacgaacgataaccgggtgattgacttcatgacccgctattgtcattatctgcaaacggttcccgatgacgctttcctgtcgagttattgggaaaatagccgcgggggggataatctttggagtgtggtttggctgtataaccgcacgggtgacgagtcacttcttccgttggccgaaaagattcacaggaatacggcggattggacaaaatcgactcagcttcctaactggcacaatgtgaatgtcgcccagtgttttcgcgaacctgccacttattttctgtttacaaaagattcggcgatgttggctgccagctataatgtccagagtttggtacgccgtgctttcggccaagttcctggtggaatgtttggggcggatgagaatgcccgtatcggtttcttcgatcctcgacagggtacggagacttgtggttttgtggagcagatggcttccgacgagatcatgcttttgatcagtggcgatccttattgggcagatcacctcgaagatgtcgcgttcaacagttatccggcttctttgatgcctgattaccgggcgcttcgttatctgacttgtccgaatatggcgatcagcgattctcgcaatcatcatccgggattggataattccggtccgttcttggccatgaacccgttcagcagtcgttgctgtcagcacaatcatggtttcggctggccttattatgtcgaacatttggtgttggcgacgccggataacggggtagccgccgttttatacaattcttgtaaggcaaatgtaaaggtgggcgatggaacggaaatcaccttacgtgaacagacgaattatccgtttgaggaaatgacacgttttacggttggaacgtccgaaaacgtatctttccccttctatctccgcatcccgtcctggtgtaaaaatgcatctgtcttgatcaacggaaaaaaacagcaaacaaagcttgctcctggaacatacgcttgtatcgaacgggaatggaaagatggcgatgaggtagtcctgaaccttccgatggaatatgccgttcgtcagtggcaggtaaataagaatagtgtcagtgtcgattacggtccgctaaccctgtccttgaaaatagaggaagaatacaagcaaatgcccagcaccgagaccgctgtttgggattccaaatggcaggaaggagcggatgcctccgcatggccgacattcgagattctgcctgcaagcccgtggaattatgccttgagagtccagtcacctatcacgttgcaacgcagaaactggccgtcggacaacaatcctttcactctctcttccgtcccgatggaatttaaggctcagggacgtttggtgccggagtggaaaattgacgaatacggattatgcggagtccttccatacgaaaacgcccgcaagtccgactgcctggatgaaatcaccttggtccctatgggagcggcaaggttgaggatttctgctttcccagtggcagagcggtgagaattaaaaaataatgatcggtctctatttttaattctcaatttttaagtgcttcatatattctgatggagtctttccgtactgcttctggaagcaggtggagaagtaggcaggtgacgaaaagccgacttggaaagcgatctcactgatgcggttctctccgttctgcatcagcaggatcgccttctttaagcgggcaatgcggatgaagtcgttaggagaaagaccggacagacccttaactttgcggtagaggctggaagtgctcattcccatcgtatcggcaagcatctcaacggagagtgcttcattgctgaggtgttcttccaaataatcgttcagtttgcgaaggaaaatatcatccacctgcgaaacggcgagagaggctaccggggcgaacggcttctccaaataggttttgttcagtagcttacggcttttcaaaaggttgcccacttgggccgtcagcagttcgatggagaacggtttctccatataggcatcggctccagagttcagtcccttcaggcgtgattgcaggttgtgttgtgctgtcagcaggataaacgggatatggctgacattgacatcgtttttcatttcgttgcaaagttcgaagccgtccatgatcggcatcatgacatcgctgatgattaggttgaccgtgtttttacggaccagatcaagagctactttcccgttttccgcttctagcacttgatatgtttccgccagttcgcgggcgatgaaatggcgcatatcattttggtcttcgacaattaggataaccgatttgcccgtttcggccaatgtgactatttccgctttctcttttccagcagtggtctgtaaactgtcttcctgctgttctgggagcatcaggacaaactggttcaagccgtccggcgtttgtcgatagaacagtctgccgcagtggaattcggtcaaagagtgggccagcgacaaaccgataccgcttccttgctggttttctgtctctttgaggcggtagaacggattgaatatattttcgatttcactgtcgggtatcagatgcccgtcgttggtgacgagcagggtgaacatgcgctcttcacctgaaggagggagtaattcgagcgatatccggctgtccgagtacttcagtgcattgctgaccaggttgctgacgatcttcgagaatgcttctcggtccagacaggcctcgaaaggtagatccggcagcttgactgtgaaattcttgtttccctgttcgaaagccggacggaacggatgcaggatcgtttccagccagaggacgacatcggtcttgacatagttcagtttgaacccgcggctttccgtcttgcggaagtccaatagttggttacttaggtctaacagtcgcccagtgtttttctcgatgattcgtaggttctcctgtgtggcgggcgttccatcccctgaacgaaggattttttccagcggggcttttatcagggtaagaggtgtccgtatttcatgcgtgataaaggtaaagaactgtatttttgcattataaagttctttttccttcttactttcgaatatttcacggttgatgcggtgtttttcttccagtttggcttttttatagttataccagagtacgatcagcaggcataagatcgtgaaataaatgagtaatgcccatccggtagcccagaatggcggtgtcaccgtgatccgaagagtcgtctcgttatcttgccaaaccccgctgctattggtcgattttacccggaaaacatagtcgccgggtgacaggttggcaaaggtcacgtctttattctgcttcatatagatccagtctttgtcactcccttccaaacggtaggcatactggatcgcgtctggagatgtatagctcaatgccacatacgaaagggtaaaagtggagcggttatgcggaagtttcaattctccgtttttcataatctggttgacattatatttaggggcaccgatgcggtcgtcctgcacatctatgcgagtgatacataccgacggtgaataaacatcctctttgaaatcgcgcggattaaaggcgatcattccgtttatcgttcccatatacatggtcccatccggcatcttgtaggcagaacaatagttgaattgcgtttcgggcaagccatccgtgtacgagaaagtcttcatcacatatgtttccgggttaaaacgaaccagcccgttggccgttgcaatccagaaaagatgttcgtcgtcttctaaaatacggtgtacgatattgctgggcagtccgttttcaaccgtgatgcggttgaatgaatccgatatctcgttgtagagggagaaaccataggtcgttgccacccaaatccgttttttcgaatcttcgaatatggatgtcacgttgttgtcgccgatggtctgtgaccgctcgcggttggatgtatagtgcgctaacttcttgtcagttttagaatagcgataagcgccggaggtggtcgcaacccagatatcccctttgctgtctttgtagatttgacgtaccatcgacttaatctctgttttccaaggggtgaaacattcttcttttttgtggaagaggacaagcccttcggaggtcccgatcaggatttcgtcttcggagagtttgcaaaagcagagtatgaagtctgccggaagcaggttgccggtattgttccgggtatatcgtttgatgattttcccggaagggatgtccagaaggtcgattccggtgttgaatgtccctacccacaaccggctgccgtcggcaagcaggccgtggatattggttgccgaaagcgggtggactgggttggtacgggagaagttcgtgatctcgccggtagtcgggttatagcggttgatcccgttatcttccgttcctaaccagaggttgccgtatcggtccggacagatttcacgtacggcatttcccggcattcccggatgggttttccctccgataaaatatttaaacgggacatattctttgggcaggtagttgattcctccgaaaaaggtggtaacccatatccccccttcacggtcttttgtgatcgaataggctgcattgtcggagatcgtatattcgtttgtcaacgatttttgcaggtgcgtgatgctccggtctgccatattcaggatgtagacaccggactcggatgcgatccagtacgtattctcactgcactgcttgatgtcgcgaacctgtatgtccgggatgactgtttccgttttccgactgtgccggtcgtaaaacttgagtcctgctcggtctgtcccgaccagtattccccaatccggcacgaggcaaagcttggtgaggttgatcggattttctttttccttttcagtcagtatcgggatacgggcgaatttgtctgcctccggtttgtagaaaaacaggtcgctgcgtccggcgaggatcggctcgctctcttcgttcatcgtgatgtctatcatgcttatctgctccccttcggggtagaaatgcggactgctttcgcctgaaagggcatagcgggcgatccggttgtagctcatcagccacaaattcccttttttatcttctctgatttgttggaaatattctggggcgttgttgctgtcggaaaaggtcaggggatggaaagcatctgtttgatagtcgtaatagcaggtgtgggaataggtgcagacccatatcctaccggtcgaatcttcgaaaaggctgatgatcctgtcgttcggcagactttccggctcgtacgagttgtagcggtatatccggaactgatgtccgtcgaaacggttcaatccgtcgtccgtcccgaaccacatgaatccttttttatcctgtagggcacaataaaccgtgttgtgcgacaatccctgtttgttggtatagtggcggaaataaaggtcgtgcgaccagccggaccgggggaggaggagcgaaagcgtgcccagtagaatgataaggaatgttctcatgccctgcgagtgttttttttgtaaagtacaaatgtaaaggaattttgcaaaacactcaatatcgaggtacaaattcggtttatgggtggtagtaacttggcgtcgtaaatagttcaatgcggcaaacgtaggggactttcggtacgatccgtcccgccctgtccggacggacgtggggcgggatggagagccggatcatcttaccggaaattccgtaatccggagggtcgtgcatccgtaagggatcagttcgatcgtctcctcgtcgccgaagtctttgccttgctgcgtgtagtagggtaccggacctgccgagcctctgacttgcgtccagccgttcagtcgcattgccttcgttttgatgcgtatgggggcgttctcgacattccatggatagggggtggtaatgtctgatttttctaccgtgaaagcatccttgatccggtcgggcgagaaggaacgggccggcagggcgtagttccagggactgtcagacgtcacctcgtaataccatttgccgtacacgtcggacttatcgctttcaaacgctttcttttcccatttctcgttcatcttcagggcatagaccagcggtccccgttcgacaacagcgctgttttcataccagcggctgacggtcacctccatcggcagttcgagggataggatatcgccctctttccattcccggttgatacgtgtgacggttccgggataggcatcgaccgtcagcggtttgccgttgagcttgaccaccggttgcttgcaccagcccggtatgcgcaggtggaaggggaagaagacctttttcactttcttgtccgtaaacgaaacatggtagcgtactgtctcctcgaaaggataggccgtttcctctttcagattcacctcgattcctcctgccactcgtgccgttacttgcgagggggcgaagagcagggaggcgagtccgttgtcggcagtcgcgtaccagaggttctgaacgaatttgggccagccttggtgaagattggacgtgcaacagggatagccggtcagctcgccgaaaagcaggtcggtgtcgtcgtgcggggtggagaactccctccactcgcgggtgacggcgatctggttggtctgctggtaatactggcgggcggagtagtcgtcggtcacttgagtgggcaaggcgttgtatgccacgcgctccaggtagtcggcccattgcatgtcccctgtgacctccagtatcgtttccagtgagtacatcatctctacggcggtacagagctctgagcctgtcgtcggtttgccgaagcgcagcagttcgtctcctccccaaaggccggtaggcaatccgatggtgtgacggatgtcgttgaccgcttggcgggtggcttggatttgcttggagtctttgccttgctggtaataaacgatcggttccttgaaaccttgtgcgaggttcacacagtgcaggctgtgttggcgtctgagatgattttgatttaaaaagatatctgtccagttgaacgtctgtttatggattaactcgcctaaatccaacaggaatttgtcgccggtgatgttgtacagccaatagacgaccatcaggttatcccctccgcgctgttcgccccagaaggtccatttgcctaacgggtttttgggcagttcgtccagttggtatcggaaatatcgggtcatgaagtcgatcacgcgccggtcctgcgtagccgtgtagtattgttgcatgactttcagcatgaccattttgggccaccagtcttgcgcgttgttgcgttgcagaccgggttcgtagtcgcggtcggtatcggggccgaagtagccgttgggcttttgtgatgccaaggtccattcgatccaaggttgtaccttttcgatcagggcttggtcgttcaggagataagccaacggcagaagtccgtcgatccagtacggaccccgttcccacacgtcaccgtcaccgccgagccatccgtttcggggacccattactttcgtgtagaccttatccaagtggccggtcattccgtcgcgcatacgggtcagttggtcgtgcatccacccttcggcgcggatggttccgagaggcagttggatgtagtctttttgcaagagcgggtgtcggttgttccggtaactttcggctgcgggttcttcgccggcggccgagacagtcgccaccgtgagggtggcgactgctgtcaggaaaatttttttcaatttgttcatggtgataggatgatgttatgttattcttgataatcgatccatactttcatcttgcctgctttgcggttgtcccaggcatagtaaggaatgaaatgtagtgtttgtccattcgatatggctttgattgagcggatgccacccaggttgtccggttcgtctttgacctcgaatgaggaggtgggcgtcagtgcgaggtcggcaaagtctttcgcgttgtccgtctcttcgaggcagtagaccagcggtccgcgttgcagggcgcgcttgcccgtgttttgccgcacgcgcgggtcggctgatactttttcgaccggcatgtccatgttgagcacgatcaagtcgccggttttccattccttgatgacggtatatcccttgtcggtcgtactgtcgactttgttcccgttgaccgacagggtgtatgacttgcaccatccggggatacggatgcgcaactccttgccgagcggttgttcggaggtgacggtcagcttgaccagcccgtcccaagggtagtccgtttcttgtttcatgacgacctttttcccgtcgatcgtgacttcggtggtgtttccgatgaagaggtttacccacaaggccttgtccgatgtcccatagatatagttcccgatggaaggcaggaagcgcgagatctggctcggacagcaggcgcacccgtaccaggcctggcggtgatggtctccgttcgattccagcggattgacgtagaagaagcggtctccagccagtgagacgccagctagcgcaccgttgtacatggaacgttccagtacgtctatgtatttcgaatcgcctgtgaactggttcatgcgttggttccagtagaccatcccgacggaagcgcatgtctcgcagtaggcatcgaggttcggcaggtcatagtcttcggtaaagccttcgttgtgccgtgaagagccgatcccgccggtcacgtacatgttacgtagtactacgtcgtcccagaggcggttcaaagcctcgacataagcggtgtcttttttcaaggctgccacatcggccatcccgcagtacaggtacatgcaacggacggcatgccccgaaatgtcggtcagttctcttaccgggataacatcctggtagtaggctgggtcccatttcccttcgccacccatgctcccgtgtccgtgtccgcgttcttcgagcagccagttggcgaagtcgagatatttttcctgaccggttgtccggtatattttcaccaaagccaattcgatctcctcatgtcccggcacccaatggcgcttgccgggaccgaacagttccatcatgtggtctgccatacggatgctcacatcgagcagtttccgttttccggttgcctggtaataggcgacggcggcttccatcatgtggccggcacaatacatctcgtgcttgtccatgttgttccaacgtttgtcttgtccggtcagtgtgtagaatgtattgatatatccgtccggttgttgggctgccgcgatcttgtcgatccattcgtccgctttcttttccagttcggggtccgggttgttgatcaggctgtaggcgataccttccaacgctttatatacgtccgaatcgtcgaagaagataccggaatgcttccctgtccctctggctgcattttcaaaattttgcattcttccggtttggttctctatttggtcgatacagacagggagtgtagccgatgtgtgcttggcgagacgtggcgaccagaagttgtcccggatgtgcacgtgcgagaagtctatctggtcgattattttcaaaggcggggtttctatttggtcttgtccgccgcatccccatagtgccatacaggcaaagagtagtacaaaatactgtttcatggttttaaaatttaatgttataatttgcaacttatttttgtcaaagtaggagaggtggctgtctttgtcccgttgatgaaaatcgacagtccggctcctcgtttatatttatcacctgtcttatcataaagcacgcatattgttttgccacgataagtcagattgtccaggcaaaagtaatcccaatatccttccggtatcaacgggttgacatcgagttcctcttcttcacttggccggattccgattaacccgttgatgacgaggtcgcagaataaagaatgattataatcttttccgcgttcttcgggtttttggtgacgtgttgacaacattgtcctggatatccaatcgccagtaaaaggattcaggttttcgtcaatccatggtgttagtatgccattcgcgtctttcttatacaggcttcgtgcataaatcgagaataaagttatgaaatctcgtgaatctacaaaagattgcgtttgattatttaacaaattagccaatccgaccaatgtcatcgaggtcgcgtatggccaagaaggaccgttccactggcattcatgtccttcgtaagcaactttgaattgaggatggcattgttcggcagttgttggcccgtaaggagcgagaaaatgtcgtgtgttcatcaggaatttccaggcgacggcatagtccgcggaagccaggtcgaatgcccaaggcgtatatccgtgtagttcgcgtacgtcttttaaagaagcgtttttttcaacagacagtacttttagaaattccgctttggggtcccataaatatttgaacatgttttctttgatccggcaggcttcggtttcgagtgcttgtgcttggttgtcgtttttccaatgtgcaattttggataaggtggcggcttcggctgccatatatgagttgatggttacccgaaaaccgtgtccgccgatcgaaatttccatgccgtcttctccgtctttttgccagaacaatcctttttcagctatgaatttttttttcttccactctgaatagttttgtaaaagttccggatataactctttcagcaattgataattccccgtgatctgacaatattggtagattgcatgggcaacgggaaaactgtaggaatgcgtgtcacctcctcccttcagccaatagtacgcatagtctttgaggaaaccggaatacttcagccacctgccttcccgaaagtggaaccaggcagggcaacagatgccgttgtgctttccggcccacgggacatccggaaggaattcggttacgatgaacccgtccggtgtctttttcaaatgtttccggaaagtccaccagcggaaataatagatttcctctatgtttttgtccggacattcgaatagcggtatattgccggataagaattcttttgcctgtccgtttgaaatatgttgcacatacaattccttgtcttgcatgttgaaccggtcgatatacgagcctatcatggcgggatcaaggacctgccctgtggttgtatatggaaaagccgtgactgtgagaagaaagtataggagaaggattacaagtttgttcataaggacattttttatttgcagggaagcttgcttccctgcgaggtttgtaagttgattacgtttgttatttataatgggggttttgttccaagttgggattggaggtcaaaactttttcgggtatcgggaagacggatcggtaatcaccttgtggtttatgcgagagccagctttttttcgtgtaaacaccgaatcggatggcgtctcgtctgcggtgcatttcccatgcgaattcccaacccagttcgtcatacattctaccgaatcggatgaggtccgtgttccctttgtctgtaacggtgtagtgttccacatagccatattgatatgaactgttttcttgtaactgtgcatcggttactatcgctaattcgggattgtctttgaatgcccgtttgcggacttccgtgaccaagaggccggctcctggttttcccgaacgcaataagcattccgctttcatcaggagtacttctgcgtatcggaacagaggcacatccgtttcggatgaggattgctcgccttttacgatttcgaatttgttcatgcgaaaaccttccatctcactggtgtaattcccgtccggaagatctttcgtatagacaagcggttctcccattttgtcgtatgtcccgtatagaggacttccgtctgcagctcgttgttcgcccatcagccagctatcggccagacgggaatcttcgggatcatacgtgtcgatgaattgagtgacccccatagctgaaccgcatccccaaggagtcgcttcggtttcgtatttctttttcagttccccgtgccaggaaaacatgtggatcgaattacccccggcgatatttgcatcgaacgggatggtgaaaatgacctctttggatgtttccacgcctgtagaacggaaggggtctttgtagttgtcggacaatgcgaacctgttgctgtttatgatgtcgtcacactgttggatacagtcgtcccagtgttcttcgcctgtatataccttggcattcaggtatatgtttgccaacagcgtctttgccgcccatttgttcatccgtccgtaaaaatttccgccttgttcttcacttaaagaagggatgatttctttcagttcttttactatgaagtcgaagatctctttacggttacttttggagggtagttccatcgtggttgtcgtgactaacggagcgtctccgaaattgtcgcagatttgccaataataataggctctcatggcccgtaattccgctaatcccattgttttgtccgcttcggaagatgccggtaaaataccgttttctatttgttctatcactttgttgcataataaggcgccttgatagaagttggaccatatttctgagacgtgtccttgttcggagttccatgtttggtagtgcatacgtcgatagactccgccatcatcccagccggaagcgttagggggcatgacgatggcgtcggcactgacctcttgtgtcgtgaaatatcctccatgactggggaaacttctgagttggctatatacgctgacaatagatggtgagaaatcgtcgaccgtgtaattgtaggtttgttcggttattttggaatatactttttcatccaagtcattgctacaggaaacgattgttccggaacaacataacgctaaaaaaaattttgtataagtattcatgataattacgttacgattaaaatttgacagatattcctaatgtgtaagtccgtgtagaaggataacggttcttattgtcgactcctggtgccaagccgcttatgcttacttccggatcaatgccggagtagcctgtgatagtggcgaggttggaaatcgtgccatagattctcaagcgttttatccaagaattgaatttgaatgtatatcctaaggtcacgttgtcgattttccaataattgcctttttcgatataatagctgacatattgtaattcttggtcggccgctaaaggaactttcccgtatttcgtatcgaatgccgcattcagcacgttccctcttgacaacatgaccggcgattcatattgcaggcgtggcatgttcaggatgtcgaaaccgaaagcaccgcgcatggtcatgttgaaatcgaagtttttccaatttagggtgttgttccagttcaagtaatgtttaggcaggccgttcccgatgatctgtttgtctgtcggttgtagttgtgatatcggtttcggactgccgtcggctccttctatgatccagtgtccgttctcatcgatatcgatacttttgtatccccagaaattaccaatcggttgtccttcctgaatgcggtgggttgtcgtttgtaagggttctcccgtagaaccttgatccgagtaaccgctggagacaaactgatcgttggaaagtgacaaaagttcgtttttgtttgtcgagtaattcatggatgtcgtccattggaaatcttttgtttggacagggatgaccgtgataccggcttctattccttggttgcgcatcgatccggcgtttgctaccatacgggagaacaggtaaggaggagatggcacgtcatagtcccataacaaatcttctgttttgcgattgtagtaatcgatattacctgtgatgcgatcttcccaaaaaccgaagtcgacaccgatgttgatctcttttttcttttcccatctcaattcggggttcgcatttgaatccggtctgatggttttgatccattgattgttataataaacataagttccgaagttcagcgtgttcagtgacatatacggatcacttggaaccgttcccgtgacaccatatccggcacgtagtttcaagatggacaagacatcggtgtcttccaggaactgttctcctttgatgttccatgcagcagaaacagatgggaagttgccccatttgtgatcggctccgaatttggtggaaccttcgtgacggagactggctgcaaacatatatttccctttatagctgtagttcagacggccgaagtaaccgatcagtttgctttcattggccgtcgagtattccgttccgcgtccgtctttcagtgcctgccctgtgcccatattattataggtatagtcattggagggaaaattgaaattctgcatgtaaaaattctggtaatgcgtcttttgccaactatatcctcctaagagtgtaaacgaatggtcttcaaaaatggttttcctccattgtacggtcagttccgacaaatcttcatttgagcgcgtggaaccacgggaagcatatccgtttttgccgtctttccaagtggatttgtgttgctgggtctcgtaatatcctctgacttggttataggtattggaagaaaacagatatttgatatctaatccttcgattggtgtataagtgatattggcgaacatgcgcaggttggttgcttggttttctccttccacttcgttcaggagggatacagggttgaagtattcgtttttagtgctttccgaataattgccgtttttgtcgtacacaggagtggtcggattgtatatcaaagcgtttctatatacttcgctgttgtagcccccaccatcggaaccggaaaaataggtttgtttgtaaccgctcaggcttgcgttcagtttcaatttgttattgaacatgcgatgagtgatttctacacgcgggtagaacatctggttgtttgtacgtttgatcaggccgttcagaccacggtattcgaagctggccacataattggtcgtacggctgccaccgcgcaggctgatgttgtaaatctgtgtgaacggtgtacgggtcacttcgtccagccagtcggttgatgcaccgtcgtcttgggctcccggccatccttcctgtacgcgtcggcgatattcgtctgctttcatgaacggcaaggtctttgtgatttgctgggtggaaagataagcattgacatctacttccgtaggcatttctccattggcattcttggtggtaatcaatatgacgccgtttgttcctctggttccgtagatcgcggcggcggaaccgtctttcaggacgtcgatctgttcgatgtcatcgggtgagacggagttcaggtcgccgggtatcccgtcgatgagcaccaaagggctggagctggctttcaaggtggtgattccacgtaaggcgatctgcgaggtggaagtcgggttggcatccggcgtaatgatacttaggccaggaactttccctttgatcagttgtgcggcatccgtagtcggtgtttttacgaaattatcggatttgattgtggaaatggaactggccacttcccctttcttttgcgtaccgtatccgacaactaccacttcatcgatcttttgggtgtcttcgatcagtatgacgtcggccgttttgttgttatcgataacgatttcttttgtcaggtagccgatgtaagaaatttgcaagatggcttttggtggaacttccaaggtgtatttcccattgacatccgtgactgttccgatagaagtcccttttatgatcacgttcgcaccaatgacgggttctccgttgttgtcggttactgtacctgtgatggtccggctttgttggccgataagagatgtcctgcccttatcgttctttttcagcaggaggatgtaccggttgtcgaattcgtaggtgatatcagtatctttgaaagcttcttcaagataggatatcattttcccggatgtgttttggacagtaatgtaacgttctatgtctacttcacgacttttgaaaacgaccagataatcggtttgattttcaatttgagtgatcaactggccgactgatatcacgctctgttccagttttatgattgtgttttgtgtttccgaattaagcgctatcgtctgaaaagtacaggcgaaaagcatgaaggacggtaacaaagtgttcattttcatttcttttctaagtaataaagtgaatactaaatgaattttgtagataaaggcttgtctgttgataacggatgtttccgatatcaatcattgtttttacagatgtgtttccataggcattttttttagatattaaacattcgattaactaagtgtaatgatattgttttcttcatccttttgtatcttgaatttgtgtattttttgtaacattctgagaatatcgtcgatgctgtctcgttgtcggaattttccagtatatttctcttgattgatggacgggtttcttatgattatccggacatcataatagagttgcaatttgttcagtatatcaacaagcaactcgtctttaaaactgtaaattccttctttccataaaaaatagtcatgatgagaaatcgtgtccacctttatggttccgttttttatgcttatttgctcgttggggctcaatatgatactttcattttctttccctgtaaaatagatttggagcgaaccttctatcaggctggttctcacatcgttgttttttcggtagctgcaaatgttgaattgtgtgcccaatactttcgtttctatgccttgcgatgagacgatgaacggtttgtgtttgtcttgagctacaataaagaatgcttctccgtctatggcgactcttcgttcttttttgtcaaaaatggcaggataggtgagagttgtgtgggagttcagccatacagtagttccatcctgaagtgtcagtttgatgcgctgtccggcaggtacgtgcagtttgttttcgatattctcctgtaaaatttcggaatgctggttcacgccggcctgataagcgaatataatgagtaaagtgatgatagctgcatatttgaataggtagaatgaaatctgtcgtatgtgtttcgctctcattttacacaagaactgggtgtagctgtctcgagtagtctttttcccgcaggcggcatcggaaaatgataatagtgcgtatgtatttttgaatttgatgaattgttttttcaattcgttatcagattcaatctgttttaagaaatccagtctttcgtctgcattcagttcttcttgaaaatatttttcgatttgtctttccatgcgaatgaaatgttacatgctgtaaacacttactccggaaaaatgtaccaaaagaaaatcattttttttacgttggatttcggattcatcgtctcgtccccagactgtcactcgtaaacatctccgcgattctatgtgcaatgaaaaaggaaaagccataaaggaagatagtcctttagttcgttcctaagctttttataggcgatgctgatttgatttctgaccgtgttggttgagatgtttagttcggtggcgatctgttcttgctttttcccttccagtttgttcatgataaagatttccttgcatttggtcggcaggctgtctaaggcccggttaattaaatcttcaatatcttggtcggagaaaatatgttgctcgaaggcttctaaagaatctaaattcatacgaagggtcatgttatattcttcttgcatattgttgatggtttccagggcaatcgttttatgtcgcaggtggttgaggcatttgttcttgatgatggtgaacagataagcgatccggattgtttgacaagtaaacatttctcgtttttcccaaagttccgcgaacatgtcttgcacgatattttccgcatcttgttccgatatcacatattcttgtgcaaagcgtttcatttttggaaagtaggaaaggtagatgttttcgaataaacgatcttctttttgttgggcggacattattgtcatatatttattgtggcctttcaaacagccagaaaaggcataattgttaaaaaagaagtgggctgctgttctttttcctgttaggtgtcgccaaacccctgtacacgcacgaacaagcaacccacttgatatagcaggtcacctgtgccttgcgtgttgttaaaaaaatggcgactttaacagaaaaaaggcacttctgaaatattccttatacagtctctccagacattgcaaatgtaggtaaattttttgttttccgtgaaaaagattaaataagcttcgtatatttgtacccgaattgaaaataaaaaagaacgtcggaatccggatgaatacgaatagtgatgacatattattgttgaaattgattaaacaaggagatcagatcgcttttcggcatttgttttatcagtatgcggattctttggaacgttttattacttattacatccatgaccgggaaaaatcgcaagacttggttctggatatttttacctatatatgggaaaaccggcagaactttgagataaaactgaccttgaaagcctatttgttccaggcggcacgcaataagtcttttacctatatccgggacaagaagattccggtttatctggaagaaatggagggtatggagattgtgcaaaactatgattcggaattggagttgcaggaacttcatcatctgatagaagaagcggtgtcgcttttgccggataaatgccgtgaaatattccggaaaagccgggaggaaaatttgaccaataaggaaatagccggacagctccatatctcggagaagacggtggaggggcaaatcacgattgctttaaagaaaatcagaattcatttgggcgattcttattcttatttgtggtaaaaacgggctgggcaaccgtaccagaatcataaagcgtccatccgttttcgccaccgacccatacagactaattacatacatgtttttgcaaaaacaactatcatactatcatatccgcctgtatatcggtttaaaccaatatgttatggtatgatagttgccgttttgtactatcttcatctatcataactatcatggtgtaaaacgataatgtcttgtgtatcaatcatacgataaaaacagtgaccgtccggaaacaggtgcaaaacatgttaaaacggcttcttttttcatcaagacaggcttttcttttgtcaaaaaccgtttgcaaaaccgcttgagacccgggtgtacccgccacggagacccgggcgcgggagaggtgcagacccggttctgcacgaaacccagacgggtctgcagagaagtttatcagccatgttggaggtacttttatgccttgtttttgcatcttattcggcgaaaaaggtcgttttatatttaaatgaccccgttttgtcgatggttatttttgcatatataaacataaatatcatattatcagctatataaatgaatagtcatgtaaaaagtgtgatagatgtatgatagtagaatgatagtaaaaaacagcaactgtcattttttaacgtattgtgaaacagtagttaacaaccggatatgatagtatgatagttggtttgcgaaattttcataaaagaaaagatgtggttccggatagcaacttttggtgcggttgccctgtaaaaacggggattcttttaggggagaaagtgctttttggagtctatatatccaagagggtggtacagaagatgggttcttggctaccgcatgatatataatagataagatgaagaaggctaaatcattctttttttggggaactgtttgctgctgtctgttctgctttttgcagatatggtatccgttttatttttattatgtcgaacaattgcaggtttttcctctcacttgggcttgttttgaggaaacatgccgacaacctggcgggttggcttgctggttgggtggtttccttttgcaattctattatcttcctttgggtggtgcgttggtttcgaccggtttgtttttggggatcggtgtgctgatgcaacggatctgccggcaaacgacatcgcctgtcttttgttatttaccggctctttgcccgattctggctttgctccctttgcatgtcgatgtgaattaccggttgcaggggacggttgcttattgttgcatgcttggggcttttgtactctatgtgcgtattgtcgtaccgtggaaacgggtattggcgggttggctgttgatggctgttttgtttgtattggcagggccggtggcaaccttgttcgttgccggagtcgtggtccgggagatgttgttgcgggagaagggatggcaaggatgtctggcacttccgttcgggattgtcctgatgctttggtggtcttatcgtttcttttggcagccggaataccgaatgatcgttttgccggatttttattatgagcctttgttgaaggcgaataagctctattgggcttggttggcttttctttcggggcttttaatggcttgcttcccgatcggaaaaggcagaggcgtgttggatcggactgcttggtggtggaccacagtccagctgttgcctttggttgcctttttggggtggatgaaaaaaaaagagaattgtatttggttgaaaaacatggagttgtgttattatgtgcggggagaacaatgggataaggtcgttgccggatataaggcggcagtatcggacatgcggactttgagcttgctgaacttggctttggcgtgccagggcgaattgggagataaactgttccattatccgcagcaaggcaaaggcggattattgccagaatggaacagtacggttccgggggcaatcgtgttgtcggatatttgctaccaaatgggggatctctcttccgctcaaaagtttgcatttgaaggatatgtctcctctgtagatggaaacccgcgtcttttgcaacgtttggtacagacgaatatcctgaccggagcttatgcggtagcggaaaaatacatccggatattagagcagactttgttttacaaagaatgggctgctgaatggcggaagtatctgtatcgggatgatcttgtggaagaagaaccgtcgttgggcgggaaaaggcgggcgtggggaaaaggcggacagtatgccgtgtctgcagatttgttggaagtgtgggaacggttggcagtgaacaatccggaccggtcggtcgctttccaatacttgttgagttttcatttgttgggcaagactttgaatcgttttgacgagttgcatcggaagtattaccggacgaaggtgtggccttccctttccatccaccaacaggaagccgtgatagcgctttatcaaaagactccccgattgtggcccgaaaaaggggtcggaatgaaagtcgagttgcgctacggtgcgttcgatcaggatatgaacacgaagcatggctatgtcaattttcgggatgtcatggccggttcgtatggagatacctattggttttatttgatgtttaagaaataaaggtacgcgatgaaacgattttattgctttttggtggcggcaattttgttttgtgcttgttcggaggattggaaaaatgggaaacggttaggtgagaagcctgttctatttcctgattatgcgcaaaccactatcccgtacaatatagctccgttgaacttcacggtccgcgcggacggatgtcgtgtgtcggtcttgttggaagcaggagtggtaaaattcaaggtggaggctcccgacgggaaagtcaggattccggaaaagaaatggaagaggcttttgcaggaggcaaaagatgattccgttcgggttacggtggcgcgtaagaagggcgatcggtgggagatttggcaacccgtatcgttgaatgtggcggtagatccggttgatccttatttggtatatcgcttgatagaacctggctatgcattatggaacaaaatgggaatttaccaacgtggaatggagtcttttgatgaaacgactgtttatgagaacaagatgacggactataattgcgtgaattgccattctttctgcggccatgatccggacaagatgctgttccacttgcgtgccaagttggccgggactgtattggttgatggagacgaggtcgagttattggatacgaaaacagataagacgatatcagcttttacctatccttattggcatccttcgggtcgttacatcgctttttccatcaataggacgacccagcagttgcattccactcagcggacggaggtttatgacacggcatcggatgtgatcgtttacgatgtggagcgccatacgtttttgtctgtgcccggactcgcttcgcagtcaagttttgatacgtttccctctttttctccggatggtaagagtttgttttattgcactgctccggcttgcttgatgcctgattccattggaaaattggcttatagcttgtgctgcatctcgttcgaccctgaatccggaacgttcggttcgcaggtggatacgctgtttgatgctcgtgcgaatggaaaaagcgtttcttttccaagagtttctccggatggtcggttcatgctttgtactttgtctggttatggcactttcccgatctggcataaggatgccgacctgtatatgatcgacttgaagtccggagtcggttcctatccggaaacgctcaacagcaatgatacggaaagttaccattcgtggtcgtccaacggaagatgggttgtgttcagcagcaggcgtttggatggattgtacacgcgtcctttcattgcgtatgtcgggaaggatggcaaaaccggtaaaccgtttttgctccctcaaaaggaggcggactactatgccggcttgatgaaatcgtataatattcccgagtttgtcaccggtaaagtgactaatcgttcttatcagattcgccgtttggcagaacagggcggaatatccgtttcttgttcaactttttgatttttttacaataagtcattcttcctgtttgcaggatattgtcatggcttggaatcggggaattggaaaaaaatcgatttgtttttaggggatgccttcatttttcgagtctcacgtttcataaatggtacgaagagacaaaaatataccgtgggaagtgattatccggaaattcaagtgtgagatttcggagaaggaacaggcagaattggatgtatggcttgccgatgtggaaaaccatgcccgattccaaagttggcaatccctttggttgtccatcatggaagaaaacatgcggtatgtttccaatgtcgatgccttatggaaaaggatggaggagcgtatgagaaaggcagagccgcgaatgttcaagttgtctttgcgttcttttcgtttgtatattgctgcggttgcggttttatttttcctgttgttctcttttgccggttatatgacggccgaatggtacaaggcaagcgatgccgtattggcttattcttccttgaatggaaaatcccggatatgtttgccggacagtactttcgtttggctgaatgccggatcgacgttagaatattttgtttcccgttggactaaagagcgtaacgtccgtttggatggagaggcttatttcgaggtggcggcagatccggaccgtctttttgtagtggaaggcggcggtgtggtcgtaaaggtgcacgggacggtttttaacatgaaggcgcgggaaaagcaggaccatgtggatgtcagcctattgtcagggttggtcgttgttgaaaatcacggtgtgtcgagaagcctgaatccgggcgaaacagccgtgtgtaaaaaaagtgttcccagcatagaaaagaaaaccacggatgtttctatctcttgcctttgggcaaaagaatccttgcgtttcgagaaaaagacgatttatgaactgaccggatatctgtcggaatggtatggcatggatatccgtttggacccgtcgttgccgaccgatcaagcctatacctttacgatcacacatgaatcgttggaggaggtgctttgcctgattgcgaagataaccccgatagaatatgtttttgatgaagataatacggtgagaataacaagaaaatagtaacaattaaatcaggaatgcctatgaaacacacgtaaaaaagtaattcgaagttgtaacaattaaatcagtaatttattaaatcttaaaaaggttatgaagaaacgaaagttctttagtaacagtggcattttgaaatggaagatgccattattgataagcattttattttggatgagtttgtccgggacggccgaagcggaagttcagcttcgttccatctcgctccggttggaaaatgtttcgttgagcgaggcgctttcacggatcgaagaggcaagcggttattcatttttctatgatgagaataagattgatttgtctcgtcaagtaagcgtgaatgctcaaaacaaggctgttaaggatattttgaaaaatatcctgttttcgacgggaatgacatttgaaatatcgaacaaccaaattgtcttggttccggaaaagaaagcagccgcaaaggaagtttccgtggctgtcgtacagcaacaaacacatatagtaaaagggatcgtagtcgacaatttgggtgaaccggtaccgggagccaatgtcgttgaaaaagggacgaccaacggtatcattacagatatggatggtgctttttccttgactgtggctcctgatgccgtgttggaaatttcttatatcggttatgtcacgcagtctgtttcggtcaaaggaaaatctactttgaatataactttgcgtgaagattcgcaggcgctggaagaagtggtggtgaccggtttcggtctgtcgcagaaaaaggcgacgctgacgggtgccgtcacggccgtcggttcggaagacatcagccgttcggttgcctccacggcttcgggtgcactggtcggtaagatcgccggtttgaacacgcgccagacggatggccgtccgggggctacgaccagtatccagatccgtaacatgggtgatccgttgtatgtgatcgacggtgtgcaatcggatgcaggccaattcaataatatcgacttcaatgatatcgagagcatttctgtattgaaagatgcttctgccgctatttacggtgtgcgtgcggcaaatggtgttgttgttgtcaatacgaaaaaaggtaaacggaacactaagaatacggtttctctgaacgcatactacggttggcagaatccgtctactttcccgaaaccggcggatgcggcgacctatatcaccaattatatccagtctgaaacggttcaaggaaagaccgactatacatatagtaaggaagactatcagaaatggttggcgggaaaagaaaaaggatatgtgccgtttgactggtatgacttcatctgggaaaccaatcctcagtattatctgaatgccaatatctccggtggttcggataagacgaactattatgtttctgtcggtcacatgagccaagacgcgatgattgtaaattatggtggatttaaacgtaccaatgttcagatgaacatagacacgcaaattacttctcgtttgaaagtgggagcttccatgaatggccgtatagaagaaaggaaaaatccgggtgttccggaggcagatgattattggatgcctcgttttgggacatatcgaaatttgccgacaaagcgtccttttgcaaatgacaatcctaaatatccgacattgacttcttctaatgccgcgacgaatttcggatggttgaattatgaattgtccggagaatataaagaaacttggcgtgtggcgcaattacaagccacggcggagtatgatattttcgatggtttgaaggcaaaggctttggtcggatattatctggcatatcagcagatgaataatcaggaatatacgtataaattgtatggctatgatgaagcgacggatacttatccggtgattttcgagaataataatccttggagagaaagacgtgtgggacacaacgaagaattgatgtcgaatattcaactgtcttacaataaaaggtttggagatcataatgtggccgctgttgccggggttgaatcgattaagcgagatacgccgacttcctggctgcatgctattccgacggctaatgcgttacatctgattgattatgagacgatggatacatataatgatgagggtaatgaaacggaggcacgtttggggtggatgttccgtggcaactatgattatgccaataaatatctggttgaattttcggctcgttatgatggatcttggaaatttccgcctgatcatcgttggggattcttcccttccgcttctgtcggttggcgtatttcggaagaaaatttctggaaggaatccaagctatcgaatattttcagcgatttgaaaatccgtggatcatacggtatggtgggtgacgataacgtttccggatatgcggcgttcgattatatgagcggttataactataagaatggcggttctgttattgatgggaaatatacgataggttcggttccgcgcggacttccggtgacgacattgtcttggatcaaggctaagattctggatgtcggctttgatgttgcttttttggataatcgcttgacggggcagttcgactttttccgccgtcagcgtgacgggcttcctgcatctcgttatgatgtcctgttgccatcggaagtcggtttcagcctaccgaaagaaaacttgaattcggatgtgcacatggggtatgatgcggctgttcggtggacagaccgggtagaggacttcacatattctatcggcggtaatattacgtattcccgtttctatgattgggaacagtataaaccgcgtttctccaattcttgggatgtgtatcgcaattcgttgaaccatcgtttcggttatctgaactggggattggaagcaatcggacagttcaatagttgggaagagatcgccacttatccgatcgacaatgaccgtcagggtaataagacgcttcgtccgggtgacatcaaatataaggatgtgaatggtgacggtgtgattaatagtttggatgaacgtccgattggatatcgggaagattccactccgattcttaatttcggtttgaatttttcattcggttggaaaggatttgatttggcgttcgattttaccggtggcgcgatgggatcctggtatcagcaatgggaacaacgtaacccgttccatgatggtggtaacaacccgcaatattatatggaagacacatggcgtttgtctgatatttgggatgcagacagtgaattgataccgggaaaatatccgatgttgttgattggaaatagttcgcacagtaattattggaatagtaccttctggaaaaagaatgtccggtatgtcaaattacgtaatttggagttaggatacacgctcccgaaacatattgtggaaaaagcgttgatctcggatctgcgcttttatgtggcggggaccaacttgttgacatttaccaatgctccgggtattgatcctgaatcgacggaaggaaatggtttgggatatccgacaacgcgtattataaatattggtgtaaaccttaaattttaggtagaaatgaagaagatatatataatgtcggccttggcagtttgtttgttctcggcaacggcttgtagtgattttttggatcgtgagccagataagatcatgacggatgaccagatttttggtgatgcggtgatgattaaatctgttttagcgaattattatggtcgcgtaacatggggacaacacataaatgatagctattccatgacttatattgatgatgcggcaaaaatggatggaggaccggatcaacgctctacgttcgaagatgatctttggcgagtgtatgattatacgttcatccgtaatgtgaatcagtttttaaaagggttgcgtgaaacggaagtcctgaaagattctgagaaagctccattagaaggggaggcgcgttttttacgtgcttggtgttatttcaatatgtgccgtggtttgggcggtatgccgataatcggagatgaggtgtttgactatcaatctggtatggatataactacgatgcagtttccacgttcgacggaagcagagatgtatgattatatcataagtgaatgccaggctgtttataatttattgccggcggagaaacagataaattctgctcgtgcaaataggtggacggctaagatgttggaagcgcgtgccgctgtctatgctgcttcgatcgctaattataataataaaatgtcaactccgattagaacagagggaggggaagttgggattccggctgataaggcatctgattattataaaacggctttggctgccgcagagaatgtgattaaagacagtccttatattctgcaggatcggcgtccggacaataagggattaaacttttatgaggcgacatctgtaaaagacaataatacagaagttatttgggcacgggattataaatatccggggcagactgttgagtttacgaaatataatattcctaagtctcatgcggaggatattgacaatagttatggcggtcctgttttaaatctggttgaagcctatgaattgcttgatacggatacccctgggacggatagtaaggtcgtgacttctgaaaatgggacatttaagttttatgattcgtctgatgctccattcaaagaccgtgatcctcgtttatggggaactatcctttatccgggtgcggaattgaaaagtgttccggtcgtattgcaggcaggtcagttggtaaagaataatggagaatgggagctgatagctggtgatttggactctaaagacgccaatggaaatgctttgactgcattgaacggtccgaaagagtctaatgaacagtatgttaataagacaggtttttattatcgtaaatttattgatgaaactcctggagcatcgacgcgtggtcgtaattccgaaatgtggatgcctcgtttccgtatgtctgaagcctatatgattgcggccgaagcgtctttcgaactggaaaacggacgtgcagccgaatttatcaatgccgtgcgtaatcgtgcaggtgtgaagccgttggaaactgttacatttgagaatatcgtgcatgaatatcgcgttgaatttgctttcgaagaccatcgttattgggatatgaagcgttggcgtttggctgataaagtctggaatggaaacaacaatgatccgcaggctcgtcaccgtcgcctctggccgtatcgtgtggttgcaccgggtgacccgaatgacggcaagtgggtgtttgtggaagacttcttgttcatgtctccgaatgcacgttatttccggatgcagaattattacaacttcctcgatttgggctgggttaacaataatcctaagttggtaaagaacccgtatcaataattaaaaatgcatgagtatgaagattatatctaatattttttcggtaattttactgctggtattgttttccggctgtggaaaagataattttgatgcgccggaatccaaactggttggtagagttacttatcagggacaggctttgaacttgcgtggaaccggcgaagcagtccagttgcagttgtatcaggatggttatgagaagaatgatccgatttctgtttttgtaggacaagatggtactttctccgctcttttgtttgatggtgaatatcgtttgacgacaagagacgggaacggaccgtgggtgaataatcatgagtccgtaaccgtgaatttgaaaggacatacggaagtgaatctggaagttactccgtattttatgatttcgaacgaacaattgtctgttacgggatcggcaatgaacgcgtcgtttatgattaacaggattgtgccggatgcgaagatcagtcgggtgatgttgttattaagcaagacgcaatttgcggatgatgtcaacaacttgtaccgtcaggacttctcggatgtcgttcccggtagcgtgaatctttctgccgatattagcggtaataccgaaatagtaaaggcaaaagccctttacgctcgtgtcggtgttttggctaacggagcggatcaggctatctattcgccagtggttcggttgaagtgataaggttattgccggataggatgcttgaaaaacggttatcctatccggttttgcgtatcaagctgatttcatgtagttttgattgatatttgaaagtaaatgattgataattgaaaatgtgatagaaggcgaaagaatacctttgcacatgatttattatcaagtcagtttgtgtttaattatatatatatttattagaaatgaagaaggcctttctgatactattgatttgttgccaagggatactgctgaacgtgtcctgcggttcagggagtttgtttgagccggataaaaggaacgcattgcgcgctccttcttatccgcttatttccgtagatccatataccagcgtttggtcgtttgcagatgaattgaatgctgatgtgacccgccattggaccggcaaggaacaggccttgttgggggtagtggatgtggatggtgtttcttatcgtttcatgggaaaggaaacaccggaagagggagcatcggttcgttttgcgactgctacccgacagttgtctgtgaatgtccttcccacgcaaacttattatacatttgaatgtggtccggttttgctcgatgtcgtttttacggctccgttattgctggatgatttggatcggatgtccatgccggtcaattatatttcttggcaggttcgttcggcagatcaaaagaagcatgaggtacgggtgagtgtcgaagctttttcatctttggccgtcaacacggaggatcaggcggtcatggttgagagggaggtggaaaacggtatttcttatttgaagacaggaacggctgagcaggctgttttgttacgcaaaggggatgatgtccgtattgactggggttatttctatttggcggcacaagtggaaaaggagacggtgatggaggttggcgatcggaaacaacttgtctacagccatattttggaggcagtgtcttcttctccgaaggccgggttcctgatggtgggctatgacgacttgtatgccatccagtatttcaaggataaccggatggcgtattggaaacataacggtaagaaaaatatccggcaggcatttgaagaatcagcgaaggaatatcgttcggttatggagcgctgccgtcatttcgacactcgtctgatggaagacgcggaaaaagccggtggaaaagaatatgcagaactttgtgccattgcttaccgccaggcggtggcggcccacaaacttatagaagataaagacgggaatctgttgtttctttccaaggagaattttagcaatggttcgatcggtacggttgatgtgacgtatccgtctgcccccttgttcttactttataatccggaattattgaaaggaatgctgaatccgattttccattacagcgaaagcggacgatggaacaagccttttgccgcccatgatgtcggaacctatcctcatgccaacgggcagacatatcctttcgatatgccggtcgaagaatgtgggaatatgttgattctgacaactgccatcgctctgcgcgaaggtaatgcggattatgctcgtgaacattggaagacgttgggtgtttgggctaattatttgctgaaagagggacttgatccggaaaatcagttgtgtacggatgattttgccggacacctggcccataatgcaaacctttcgataaaggcgatcatagggattgccggatatggaaagttggccgagatgttgggagataaggaacagactgtcaggtatgtttcagccgctcgcgagatggcagagaaatgggagcggatggctgatgatggagatcattaccggctgacattcgaccgggaaaatacttggagccagaagtataatctggtttgggatagagttttgggcttgcatatctttccggacaggatcgcccggaaggaggtcgctttctatttgagtcggcaacagccgttcggccttccgcttgacagccgcaagacctataccaagattgattggattttatggacagcgtgcttggcagatacgcaggaggatttctcccgtttgttatcacccgcctataaatatgtgaatgaaaccgaacctcgcgtacccctgaccgactggtatgaggctaccgacggccggtccatcaacatgcgtgcccgttcggtagtggggggcttttttatgaagatgctggaaaagcagatgtataaaccctcttttcgtcctgagccggcggaagaaccagtggtggaagccaagagcacttatcggaatccggtgatcgattacagtttgcctgatccgaccatcatcaaagcggatgatggctatttctacttgtatgcaaccgaagatatccgcaatacgccgatccatcgttcacgcaacttggtggactgggaggagatcggaacggctttcacggaagaaacacgtccgaccttcgagccgaaaggaggcttatgggcaccggatatcaattatattaacggacaatatgtattgtattattccatgtccgtctggggaggtgagtggacctgtgggatcggagttgctacatccgacaaaccggaagggccgttcattgacaagggaccgttgttccgaagcaagacaattcaagttcaaaattctatagaccaatttttcatggaggataacgggaaaaaatacctgttttggggtagtttccgcggtatctatgggatagagttgtcgggagacggcctatctgttcgggacggagccaaaaagaaacaggttgccggaaccgcctacgaaggtacttacatccataaaaggggcgattattattatttgtttgcctcgatagggagttgttgtgagggattgaaaagtacctatactacagttgtaggccgttctgacagcctgttcggcccgtacaccgacaaacagggacgaccgatgatggaaaatcatcacgaagttctgattcatggaaatgatgcttttgtcggtacagggcataactcggaaatcgttacggacgaccgtgggaacgactgggttctctatcatgccgtgagccgtgaacatcctaccggacgagtcctgatgttggatcggatccgttggagagatggctggccggaagttgaaggggcaagtccttctttagaagcggaagctccggagtttattaattgaaaattataatcattcacaaatcataaagtataaatcatgaaaaagaccttatttgtatgttgtgcattggcactggccttgggtgcacaggctcaatggaaaccggtaggagataagatcaagacaccgtggtcggaacaggtaaatccggcgaatgtccttcctgaatatccccgtcctcagttggaacgtggcgattggcaaaatctgaacggggaatgggaatatgccatcaaaccggttggcgatgtagaaccggcaacattcgatggtaagattttggttccttttgctgtcgaatcctctctgtctggcgtacagaaagaagttggcgaaaacagcgaattatggtataagcgtactttttccgttccttcagcctggaaaaataaggacatcatgttaaatttcggtgcggtggattggaaagcggacgtgtttgtaaacgacatcctgatcggttctcataaaggcggtttcactccgttctccttcaacatcactccgtatctgacaggaaagaacaaccagaagctggttgtccgtgtatgggatcctagtgataagggatatcaaccgcgcggtaaacaaacttcccgtccggaaggcatttggtacacaccagtaaccggtatctggcagacagtatggttggaaccggtagctgctgcccatgtgacttcggtaaagtctatttccaatattgacaataatacgttgaatgtgacggtcggaacttcctgcgactgcaattccggtatcgtaaccgtgaaggtgttggacaaaggccaggttgtggctacggccaaaggtgttcaaggaaaggaattgcgtttgtccgtacaaaacccgacactttggagcccgtccaatccttatttgtatgatatgacggtttctttgtcgaaagacggaaaggtgctggatgaagtaaaatcatatacggctttccgtaagatttcttctaaacgcgatgctgccggcattatgcgcatgcagttgaataatcaggatttattccagttcggcccgctggaccagggatggtggcctgacggactttatacggctccgacagatgaagcattgttgttcgacatcaagaaaacaaaagactggggcttcaatatgatccgtaagcacgtgaaagtggaaccggcacgctggtattatcattgcgataaggaaggtatcttggtatggcaggatatgccgagcggcgatcatggctcttatatttgggatcaccatgtatataacggtggaaaagacaatgaacgtacacctgaatccaaggccaactattatcgtgaatggaaagagatcatggacctttgcatatccaatccttccgtagtcgtttgggttcctttcaacgaagcatggggacagtttgaaacggaaaaagcggctgaatggacaaagacttacgatccttcccgtctggtgaacccggcaagcggcggcaaccatcgtccttgcggtgatatcttggatctgcataactatccggctcccgatatgttcctgttcgatccgaaacgtgtgaatgtgttgggtgaatacggtggaatcggccttccggtagaaaaccatttgtggtggaacaaacgcaactggggatatgtgcagtttaagaacagcgacgaagtgacggctgaatatgtcaaatacgccaatatcctgaaagattatgtgaaacgtggtttctctgccgctgtctatacgcagacaactgatgtggaaggtgaagtgaacggtctgatgacatacgaccgcaaagtgatcaagatcgacgaagctgctgtaaagaaagccaatcagtcagttattaacgaattaaagtaaaagcatgaaacggattagcatagcttttttatctctttttctgtgcgtggcctctgtctggtctatgccgcgtcccgaatatccccgtccgcagttcgagcgggcgggttgggtcaacctgaatggggaatggacctgctcgtttgatttcggcggttcaggaatggaacgcgagttctataaatcgaaaggttttgacaagaagatcactgttcccttctgcccggaaagtaaattgtccggtattggatatacggactttatcaatcatttctggtatcagcgtccgatcacgatcccgcaggaatggaacggaaagaacattctgcttaatttcggtgcggtctactataaatcggaagtctatatcgacggagttttggctaaccgccatttcggtgggacttcctcgtttgccgtggatattacttctctggtaaagccaggccagacacatagtctggttgtttatgtagagagcgacgtccgtggagccaaacaagcagccggcaaacagaatctgcaatacgcctcttatggctgcaactacacccgtacgaccggtatctggcagacggtctggatggaagcggtccatccggaaggattgcaatcggttcagcttctgacggatatcgaccagcagcaattggtggtccgtcctcgtttctataaggaagcaggtggaaaattgcaggtgacattgaaagacaacggcaaggtggttgccagccggacggtttcggcaagctctctgtcttctgtggtccttccggtcaagaagatgaagacctggagtccggaaagtcctttcctctacgatttggagtacaaagtattggataagaatggaaatataattgatgaggtcaatggttatgccggtatgcgcaaagtgcatatcgaaggcaataagatttatctgaacaataagccttactaccagcgcctggtgctcgaccaaggtttctatcccgacggcatctggacggctccgagtgacgaggcgttgaaacgggatatcgaactctctatggaggcaggtttcaatggagcacgcctgcatcagaaggttttcgaagaacgtttctattattgggcggataagatgggttatctgacttggggggaagcttccagctgggggatggattgtaacgatacggaaacggctcgtaatttcattaccgaatggagtgagattgtgcagcgcgaccgtaaccatccgtcactcctgatctggacgccgaccaacgaggagttctggcccgaccgtgtgcaatatccgcgtttgatgcacgacctctacaacctgacgaaaatgatcgatccgacgcgtcctttccatggggcaagcggtggaacgcatatcgcaaccgatatctggaccgttcataattacgaacaggaccccgccaagttgaaggagaaactgtataacggtggcaaactgatggaagctccgaaatgggaaatccatctgatgccgatgaatatcggttacaacggcctgaaatataccgaccagtatgctttcccggaatacaagaaggacatgccttacttggtggatgagtttggcggtatcaaatggaatccgtcgcagcagatggagagcgcccagaatacatcctggggatatggcgaaccgcctcgttccctggaagagttctatgctcgtctggaaggccaggtggatgctgtgctctctctctcaaatgatatttggggctattgctatacgcagcttacggatgtggaacaggagcaaaacggtatttattattacgaccgtacccctaagttcgacatgaagcgtatccacgccattttcagtaagacaccagattcaaaataataacggactaaaaatcaattagggggcagggaatatccttgtcccctaatttttttgtgcctattcggagcgttgtttctcaaagtggtaaggaaaatgcaaaatgatcctatccggactctgcccgttctcaagaagcaactgatccggaacataccataaactatctcggaagtcatagtaaactaattcaaggcatatagcatattatttatatgtagtactacttgtcacgaatacgtagtactatctatcatcaattggtagtactacatatgggcaattggtggtgactgccaatagatactttgctatatgttatcatttagttcttgaggtgtttggagttagttgatggcatgaaacgagttagtgtaccagttatctgcagaccgatgtcattttagtcatttgcccagccatgttttgatacgtttgttcattggcttttcaaaatagtagtaggaaagcaaacatattataatcggttttctttctccttggttttataggcttttcttaacactctgcgggggaggagccgtattgtttaaatcaattataatctgtaactttgccggataaacagaatttgtaatgaaatataatacagaagaaaagaaattggttatgcccgaatatggacgcaatatacagaatatggtggactattgcattaccattcaggacagggaagaacgtaaacgctgtgcagacacaataatcaacatcatgggaaacatgtttccccatttacgcgatgtaaacgacttcaaacatattctctgggatcacctggctattatggccgacttcaaattggatatcgattatccgtacgagatcgtaaagaaagaagacctttactcacgtcctccgcgtataccttataacaattcgcgtatacgttaccgtcattacggcaagacgcttgagaaaatgatccagaaagcaaccgaattcgaaccgggtgtggaaaaggaccagttgattaaattgctggctacccaaatgaagaaatcgttccttacctggaacaaggaatccgtagacgatcggaagatattcaaagacctcgacgaattgtcggaaggtcagatcatcttggatgaagaggtacataagctggcggaaagccgtgatatactcgctcgcaacaatacgaacaacaagaaaaactattcacgtaaaggccgatgagttcatttgtcatagaaggcggttaccggttgtccggtgagattgttccgcagggcgcaaagaatgaagccttgcaggtcatttgtgcaacattgcttacgccggaaaaagtgacaatccataatgtaccggatatcctggatgtgaataacctgatacaactcctgcgcgacatgcaggtgaaggtggagcatccggctgccgatacctatacatttcaggccgatgctgtcgacttgaactatctggaaacggacgagtttttgcgtaaaagcggttccttgcgcggttcggtgatgatagtcggtcctctggttgcccgttttggcaaggctttgatccctaagccgggaggcgataagatcggacgccgtcgtctggatactcactttgtcggtattcagaagctgggggcttgcttcagttatgatcctgaccgccagctctacgaaatagaggcgaagaagctgaaaggcgcctatatgctgcttgatgaagcttcagtgaccggtacggccaatatcttgatggcggccgtgcttgcagaaggaaaaacaacgatttataatgccgcttgcgaaccttatctgcaacaactttcttccatgctgaatcgtatgggagcccgtatttcgggtgtcggctccaatttgctgacaatagaaggggttgaggcgttgggtggcactacacatacgatcttgccggatatgatcgaagtaggcagttttatcggaatggctgctatgaccggttccgacatcacgatcaaaaatacaggctatgatatgttggggattattcccgattcattccgtcgtctgggaattacggtcgaacaaatcggtgacgatatccatgtcccgacacacgattcttatcagatcgagacgtttatcgacggctctattatgacgattgccgatgctccctggccgggactgacgccggacttgctgagtgtcttcctcgttgtggcgacgcaggctgtcggcagtgtgctgatccatcagaagatgttcgaaagccgtctcttctttgtcgacaaactgatcgacatgggagcgcagatcattctttgcgatccgcacagggcgactgtgattgggttgggcaatcgtttcaaactgcgtggttccaatatggtttctccggatattcgtgccggcattgctttgctgattgcggcgatgagtgccgaaggtaccagccatatccataatatcgaccagatagaccgtggatatcagaatattgacaaacggttgaacggcatcggggcgcgtattacccgactttaaacattcttgtcatgattaagaaagaagatgttttcaagataggacagtttgccaaacctcacggcataaagggggagatcgcgctggttacaaacagcgatgtttttgacgattcggacgatccgtatattatatgtgagatggatgggatcctggtcccttttttcatcgaggagtatcgctataagacggataccgttatccttctgaagttgaagaatgtggacgatgagaaagcggcccgtgaattttccaaccgcgaagtcttttattcgctcgatgaagtggacagggatgacttggtgggagatatgacatgggatagctttatcggttatcgggtcatagacgaacatcatggcgaaattggcgagattactgatgtcgacgagtcaaccatcaatgtccttttgcagatcgaccataacggtgaagaactgttgttgcctgccgccgaggaactgatcttgtctgccgatcatgagaataagacgctggccgtttccgttccggaaggtctgttggatttatgaaattgacgaatacacatggcacaaaagcaaagacgaacaaataagaaatcattctggcaccggattaggtttaaatacaaactgtctttcttcaatgaaggaacgctggaggaagtatggtctttccggttgtcacagctttccgcatttgcgatgttggccttgtttgctttcttgctgatcgcttttactgcctttatcattattaagacaccgatacggaactatctgccgggttatctggatgtggaagttcgtaaggagatcatgcagaatgccttgcgtgccgattcgttggaaaggatgatccagatacaatctctttatctgaataatgtggcgggtattctgtcggggacgatgccgatcgattcgattcgagagatcgattcgctggcacgagtgaaccctgactatgagattcctcaaacgaaggaggaaaagaagtttgtaaaggattttgaagaggcggagaaatacaacttggcagtcttggacccgaatccggttcctactgacggtgtctttttctacaagcctgtagatggagtggtttcttctcattataatgccaatatccggcattatggtgtcgacttggttgcagccccgaaggaaagcgtgctggctacgttggatggcacggtggtctttgctggcttcgatccgaactccgggaatgtgatacaggtgcagcataggaatggttttttatctatttataaacataacgaattattgctgaaagaggtgggcgaccgcgtcgtcgcgggagaggccattgctctggtaggcaatacggggaaattgtcgaccggtccccatctccatttcgagttgtggtataaaggtggcccagtcaatcccgaagaatatatagcattttaatacgcatgaaaagaaacttggccatattaggttctacaggttctatcggaacgcaggctttggaagtagtcagcgaacatcctgacctttttgaagtatatgctcttactgccaataatcaggtggatctgctgattaatcaggcacgtaaatatatgcctgaagtggtggtaatcgccaacgagcagaaatatcccgaactgaaggaggcattggaagaccttcccatcaaggtatgggcgggttcggatgccattgcccaggtcgtccagtcggaaccgatcgatatggtgctgacggcaatggtgggatatgcggggctgaaaccgacgatcgcagcgatcaaagccggtaaggcgatcgcgttggcaaacaaagagacgttggtggtggccggcgaactgatcacagctttggctgtcgagcacaaagtgccgatcctgcctgtagactctgaacattctgccattttccagtgtttagcgggagagtgggagaacccagtggaaaagatattgctgacggcttccggcggtcctttccgtaccaagacaatggaggaactggcagttgtgaccaaggcacaggcgttgaagcatcccaactggagtatgggggcgaaaatcacgatcgactcggcgtcgatgatgaacaaggggttcgagatgatagaggcgaagtggctgttcggggttacgccggaacagatacaggtcgtggtgcatccgcagtcggtgatccattcgatggttcagtttgaagatggtgcggtgatcgcccagttggggattcccgacatgaaacttccgatcagctatgctttctcatatcccaagcggttgcacagtaaagcaccccgtttggacttcactcaatatgcgacgcttactttcgaggagccggatatggaacgtttccgtaacttggcgtttgcgttcgatgcagtcaggaaaggtggtaatatgccttgtatcttgaatgctgccaacgaagtagtggtcgctgctttcctgcgtgacgagatcggcttcttgcagatgagcgacgtgattgaaaaaacaatggcgaaagccactttcatctctgtccctacctacgaagattatgtggcgacggatgcggaggcgagaaaaattgcggagcaattttttaattgatagttaggagagaaaatattataaagaaagataatagataataattaagaacaagacgattgaggatggacaagggacaagaagaagtatgaaggtatttaattgtcaattgttcattgtcaattgtcaagagacaaagtatggagacatttttagttaaggctctacagctcattttgagtttatcgatattggtgttggtccacgaattcggacattttatctttgctcgtatctttaaggttcgggtggagaaattttaccttttctttgacccgtggttctcgattttcaagtttaagcctaaaaacagtgatacggagtatggtgtcggctggcttcctttgggaggttattgcaagatatccggtatgatcgatgagagtatggacaaggaggcgatggcacagccgccgaaaccttatgagttccgttctaagcctgccggacaacggttgatgatcatggttgccggtgtgttgtttaactttttgttggcgctgtttatttattcgatggtgttgttcacttggggggatacgttcctgccgttgaaaaatgtgaaggcgggtatggattatagtgagactttccataacgttggattccaggatggcgatatcttgctgaaagcggacgatacggagttggagcgtttcggagaggattgtttccgccgtgtactcaatgcacagaccgtaacggttttgcgtggtggtgttgaaacggtaattcccatccctgaagatatggcacagcgcgttatgcgggataagaaaggatttgcctcctatcgtttcccgatggtcgtgcgcgaattgggtaagacggaaagtggcgaatcacctgccgcagttgccggtttgcaaccgggagacagtatcgtttctattaatggcatcgtaaccccttctttctatgaggtaggtgaagtgcttgcacaaaataaggataaggatgtattggtcggtttttatcgtgccggtatcccgcagacattgacactgcatacggatacggctgggaaaatgggtatttattctgtttcgccttttgatatgtatcagacggtgactcgtaaatatggtttcttcgaatctttccctgccggtgttatgttaggtgtgaacactctgaaagggtatgtcagcgacatgaaatatgtctttacgaaagaaggagcttccagcctgggagggttcggtacgatcggcagtctgttcccggcggaatgggattggcattcgttctggatgaaaacggctttcctttctatcatcctcgcctttatgaatattctgccgattccggctttggacggcgggcatgtgatgttcctgctctatgaagtgattgcacgccgcaagccgagtgacaaattcctcgaatatgcacaagttaccgggatgttcctgttgtttgctttactgatctatgcgaacggaaacgacattttcaggttcttcttcaagtagtgaagtaaatgatatatgaataaacagccgcttatcattcttttaacagagatggataagcggctgttcttgtaaagagacgtctgtttaagctgaggcatcattcaaaacaccggtgttttgaaaaggaggggtagagggagcttagaacaggctgctgatatctatgtctgccactcctgccgttgcttccggaagtgtgataagggcagtttctggaaattccttttccagatattgggtgaggtattccagggtgttggcggttatcagttcgtctgtaggcggataaagattgtaaacaaccgttcggaccggaattccgtattgtttgcaggcgtagagacttaataatgtatggttgatgctacctaatttgccggatgtcaccaggataaccgggtatccttgctcttttacataatcgatggcgagcgaatgaaaatcgttcggaaccatcaatccgcccgcaccttccagcaagacgtactcatatttctcttgtaggcggcgggttgcctcggtgatgacagagagatcgattgtcttcccgtctttctccgcagccatgtggggagagcagggataggtgaagatgtaaggacaagttaatccggctttatcctcttcagtgaaaggaattccctgtattttccggtgcatttcgatatcttccgagacttctgtgcaacccgtttgaatcattttctgggtgatgacttttttccctttttcagccaatgcgcatgcaatcatgccggtggcgaaagttttaccgatattggtatcgattcctgtaataaataagactgttcctttcatatccttttttattttttggttgctaatatataaaacgggcggtatgtgagtgtcacttggccgtcggttgtcgcgaactgttccacatattgccggcagaatgattcctgctggccttttgtccaacagccgtttcccgtcgctgtgacgcccgttgctttgaggtgtctcagtacgtccagtggggttttgaaggtaaggacgatcgtatcctcttcttgatgcagcagattgaaatctgctgtggatagccatcctacaagtgtatcggaggtcgggtacacaagtccttttcctgtcagtttcttgatctcatacagattgccggggacaaaagtgctgaacaggagtaatccttgctgcatcagcagtcccgacagtttatggagaaatgtttccggttctttcatccactggaaaacagaggcggatgcaatcaggtcaaacttgccgggaaaggatagtgtttcggcatccccagctatgaagcggggaggagaaccagggaagagctgctctatcttttcctggcagtcctcgcaaagatcattcagtatccattcgtcaatatggcattgttgtttcagcactccggtgaatccgcccgtgccacagccaatttccagcatccgtttgtaacggacattcgcctgatgagggaggagagaagcgagtttccgactgatacggtgttgggcatcggcatggttgtcgtagctggacaaagcacgtgtaaagcggatatgtatctgtttagtttctattgcttccatatttcgtcccattgtttccataaataaaaaggatagtgtggagcttctatctcggttataggacaacggccttgccagaaggcacgcagattctcggtaggaaagatccggtctttggaggagatgagagcctgtgtccatccgttaaacaaggcggaagctggtgaggctttctttatttcggcgtacaggtactccaattcttcccggatgtcggcgagcggacgaggcggtatctgctcgtaggcttgcagaatatcccgtttgccgcacatgcgccggttgaagcgtcgcatgccttcttcggttacgttatccaatgttccccggaagatcgtttccgggataccccaccggtcatgaacggggcagggagtcccgttgacggcaatggcttcggtgaaagatacaggctttttaccaaacatgaccgaagcagcccatacacctaatgaccaagctaccagtcggattttccggtatccggaaagggcttctccttcaaaatccattccccggtagtcatagcaaatccaaagatccgtatccggttccgtttccagctgccggaatacttcaggagaagctgcccagcctgaaaagatgagaagaagttggctgttgcctgtttttgtttgtttatatatgttcatgcttttgatttatgaattttgatttatgaatggtgaattatatttgtgtgttttgatataaatcataattcattaatcataaatcggatctcctcttcagttatgtcggctgttaatgagaagcgtatccgcgctgtccctttggggactgtgggagggcggacggggaggcagtagaaacctttccgctgcaggtagaggcttgtctggatacagtcttcgttctctccaataatgaaaggaatgatgtggcttgccgatatttctccccctttccctttcaaggcctctgaaagcaagtggctggtaacggccagacgatgccgctcgtcggtaaagctgggaagtctctcaaacagaaactttgtccaggcgatttgagcaggtgggagtgccgtgctgaatatcagagggcgcatcgtattgatcagatattccctaaccgtccggctgcacaacagataggctcccattgatcccaaagcctttccgaaggtaccgaccaagagatctatatcgcggatgcaatcctgctcttcggcgacccccaagccgttttcccctcttacaccgatagcatgcgcctcgtctacataaagccatatattcggatatcttttctttaaggataccagccggccgagatcggcgatatctccatccatgctgaaaatactttccgtgacgataataatttgctcgtatgcatgtacgtatttagccaatagctgttctagatgctcataatcgttgtgacggtaacgttggtaaggtgcgccgctcagcagaatcccgtcgatgatactcgcatgtaccagtttgtccgccaggatcaacgactgtttatccgtcaaggcgggaagtattccggtattggcatggtaaccgctgttgaacagcagggcggcttcgcgtccgaagcggttggccatcagttcttccaactcggtatagaccatgaaattcccagtcagtaaccgggatgaagaagaagagaacggcaggccgctttcctgcaactgttcgataaactcgtcccgcagatcctgccgggacgagagtccgaggtagtcgttggaagataggttgagcattgtctgcccctctttttcgatccatttgccacgatggacgatatcaggaagactgcgcagattaccggaagcccttagtttctccaatatgtcgttataatctttcatcttattttgaatctaatacggttaacagcccttttgttaatttagacaattcctctttttgaatgataaagggtggcatcaggtaaaccaacttaccgaacgggcggacccagatgcccttttcgataaaacgtttttgtaagacggccatatttaccggttctttcatctcgatcacaccgatggctcccaacacacgtacttcttgtacgtcggggaaagatgcggcaggagccagctcttcccgaagctgtgactctatggccttcaccttttcctgccatccgctttccaacaggagcgagaccgatgccgatgcgattgcacaggccaacgggtttcccatgaaagtgggcccgtgcatgaaacaccctgcctcaccactgcaaatcatatcggctacgggtgtactggtgacggttgccgacagtgtcatgtaacctcccgtcaatgccttgccgatgcacatgatgtccggttccaccccggcccattcccaggcgaaaagtcgcccggtccgtccgaatcccgttgcgatttcatcaaagatcagcaatacttgataccggtcacacagttcacgtgccgctatcaggaatgtgggtgaatagaagtacatgccacctgctccttggacgacaggctcgaggatcagggctgcgatctcttctgcatgcttctcaaacaagtcttttaaaggttcgatcgccttttcgtcccatttctcctcgaatttgatggaaggctgggggataaagtattgtacaggcaggcttccggaaaagatcccatgcatgccggtaaccggatcgcagacagacattgcgtgccaggtatctccatgatagccgcttcggatggtcgcgaaagcatattttttttgtttcccttgtgactgccaatattggatggccatcttcatggcgacttccactgcaacggaaccgctgtcggcaaagaatatcttttgcatggaaggaggcagcaacgggagcaacttggctgccagctctactgccggttcgtgggtaaagcctccgaacataatgtggctcattttgtccaactgtgccttggccgcagcattcaacaccggatgattataaccatgcacggccgcccaccatgatgacatgccgtcgatcagttttcggccgtctttcagggtgatcgtaaccccttctgctcgttcgaccggatagaccggaagcggatcgattgtcgatgtatacggatgccagatgtgttcccggtcaaagtgtagtaattcttctgtcgtcatctttcccaatctgtattttcggttaatgaatatccttcggaggtgaaaagagctttgtcttccgctacccggctcccgatcgttgtcagcaggtcgccgatgatcgccgaattgatacctatataaagagccttgcgctgtatcttttcacttagttgggcccgtccgcctgagaaacgcaggtaagcattcgggttgatgaaacgaaacagggcgatcgtggtcaggaactcttcatccgtcaacggttgtgccttttccaacggtgtgccgggtattggttgcaggaggttcagcgggatagagagaatcctttccttttgaagcaataaagccatctcgatacgttgctctaccgtttcacccatcccgattatcccacctgaacagatacggaaacctatttcccgtgccgtccggatcgtttctagtttctgttccggcgtgtgggtcgtacaaagggtgcggaagtaggagggggctgtttctatattgcaatggtaattttccgttccgctgtcgtaaagggcttgcagttgctcacggtttaggagtcccatcgaggcgcaacatttgatatcgcaggttcgcttgatacggcgtacggtctctgtaatctttaccatatctttgtccgaaaccttcttaccgctggtgacaagtgcaaaacggctgattccttgcttatggttatgtgtcgcatggcggatacattcttctgccggcaacagcgggtaaagcgtcacgtttgttttataatgtccggactgtgcacaccatttacagtcttcgctgcaattcccgcttttggcattgatgatggaacaagtgtcgaacttgtttcccatgaagtggcgggtgatctgatgagctgcttcgtagagggcttccttatccggaacggcagccagttcttttgcttgttcttcgttgatcatgccaccggaaagaacgtgttgtttgagtgtttcaatcatgtatttgggtatttgtataaacgaaaatcgcggaaggccttcagtttataactgagaccttccgcgatttcggaaatgttatcttttattatgtgtgcatacgatatgtgtgcatacgatgccgcaggtcggtttgcgatctggacaggacataaggcttgcaggagcagggacagggtgatgtcttttgaacagtctggatgagatgtattctccttttcttcagtctccccatcgtttaccttgtcgaaagtgagcacggacgtatgtacggaaccgtttttagcctggaaccgttcagatacgtttgccgacaactgcccgatcgtaacggcatgttgtatactgatgaaagcagcatacctcttccggctccatcttctgaagcggagagcaacaggtttgtatgtatactgcttcctcatggtcttatgctaccttttctaattttttcatgacagagaaaatgaatacggcagaaacgagacatacgccgaccaatacaccccatacgatccacagaggcatatctccccaaatccacgctgctacggctgtcaaatagtttccgatagctgttgcaacgaaccaacctcccatcatcatacctttgtatttgggaggagccaccttcgaaacaaaggaaatacccataggcgaaagtaataactcaccgaatgtaagaaccaaataagtggaaattaaccaattgggtgaaacgaaagaggcagtaccggcctggattgcttcggattgtgcttcgggagtcaataggccgaatgatgaaaacatcattaagatgaatccgcatgctgccaccagcatgccgagaccgattttacgcggtgccgacggttctttgccttttctggataatgccccgaaaatagccatggaaacaggagttaaagcaaccacaaagaatgggttgaattgctggaaaataggagcatctacgggaaccgaaccattgagtgaactatagcggtatcctaagaatgcaagtgcaagtagaatgacgataccggatattgctttgccttttcctgtagaagactggaataaggaaaatagaccatagacgataaagattatggcaaccagattccatacatcgaacatcatgctttccaagccagttgaacttttggccgtgaactcatcggcaaaataagtcagggtaagtccgttttggtggaatgccatccagaaaaagatgacaactgcaaacactaaacacagagctatgatacggtcttttgtttctctcggagagagttcttccactttggccgtttcctttcctgcgcttgtttgtttgatatttccttccacatgcttgaatgtgcggcgagaggaataatagatagccatggatatgatcagagaaacgcaggccactccgaaagcaaaatgataagagtcgtttacactaacccctaaattttgctgggcgtattccatgatctttacggctgctgtaggagcaaacaatgcaccgatattgatcgccatatagaagatactgaaagcggaatcgcgtttggatgcatattcgggagagtcgtataagttaccgaccattacttgcaagttccctttgaatagtccggttcccgtactgattaccaacaaggcggaaaacatacaggccaaagccaatgtcccactgcctaatggcaatgcgagcagaacatatccggcaaacatggcgatgataccgattgtcaccatcttgccatacccgaatttatcagctaagataccgccgatgaatggtaaaaaatagactaaagcaaggaatgtggagtagatcgtacctgccatacctggcgatagaccaaagtttgcttttaagaaaagtacaaaaattgcgagcatggtgtaataaccaaaacgctcgccggtgttcgctaaggctaacgcatataaacctttaggctgtccttcaaacatagaattaatttgttagatgattattgaatgatttgttttattgcacctgtttccggatagaaataaacttttaccggagcttttttatcttcaaacatgatgggggcaagtccttcccgtgtaccgaattgggtaatttgtgcttcgcctttataaagtgtttttttgttcatgctgatttcgatgctggctttacctggtacattatatataatgcccttcagtgatttttctttcttttcagcctctttcgggtctaaaacaggagcgcggtcgatggcttttaagttcatatacacaggtgctccgcccaaatcgtcggcatctacgattcccaattggggggagaagcggaataatacttctttatcgagattgtcgaaaggtacaatagtcacttcgtagtcactgacttcctttgcctggatacctgtgaacaagttggttagcgctttttcctgctcttccagttgttggatgaccagcttcatcgcttcgccatcgggtggcaggttatcggcatcacccgtaagaatgttcatgcggctctcgcggatacggtagatttgtttggctgccacttctgcctgcttggctgtagatcctgccataagcaactcttctgacaaaacagaggcatcggttacttttgtcggagcctgatttttctttcttgccgcttccagtgctgattcatcgggggtatattcggcattgatggaacaaagcagtccgtcttctgtcaaataagcatatggggcaactgttcccgctttaaattcaacgatgaatgtattgtctgcatcgggtacacctttgttgaccaagctgatctttcctaattcgtaatagaccttatcttctgtgatagcgtcttttactcctaaatatttttctgcgtatttataatagggacctgctttgcaagttactttcgtaacttctgcatctacaaccagagatgttttaggaagtgaataagttataccgaaattatttgccttgacggcatttttctttacaactttagtctgagccataatgggtaaactaaggagcagactggctataatgattaaattcttcatattctaatctaagtttaatctctactaaatgattgtacaaaactatgaaatattttgttagtaaccaaccggaaaagcctcttttcctcatttatagatcagagaagagataaagaacggtcccaaaggcggcggaaaaggagatcgagatattaggcttggttaaatcaccgcccgggactgttcttgtatattaattaaaataagatttgttttagtgatcgacaaaggtaaatttctcttcattattaagcacgtatttttgttgacaaaaatgtgacaagttgtacttccttagaaatcagatatgaatttgtcgaacttttctgtgttttgaggctctcctgtgaactttttatataatcttctgcgacattgagacacccctgaacttgtgatatgcataatgaaggctatcttttttatgggtaattgcatctttactaaataacaaatatgtatttcttctatggagatttgtgggtaaagttttataagtcgattggtgaaatctggatatgttgcatcaatcaattgatgtagttcttcccattcatttggaccaagttgtatgtcattctccctatgaatcctaatatataaagatgagttatggaaatctttatccaataaaagaaatgttccctgtttttcgaaaatttgcctgttttccatttcaagcattaattttctcgcttcatatagttgtttttcgacttcacccatttcttcttgtttagatcggagcatttctgttaattgagaaatttgtttttcattgtcttctatgtattgttgactgcgtttgtattgctcttcttttaaatgggcaaatctcttttttctattttgttcttttttgaaaaatatgaaacttaaaatgaagatgatactgaaaacgataatcacttgatatatcaaaatcattctttgggttgcttctttttcgtatttacttttttcattaatataaggggcaatacgaaaagtaaaagttcagtaaatataaaatagcacgtagataaaaggatgtcagacagttatgataaatcaataaacagcatgattcaatacgaaaagtacaagtaggtttaattgagttgatgtttatgttaaatatgtgagtgaatttgggaggttttgaaatggtatttgaattcgatgttaattaagaatgtatgatcacatgaattgggctgattctgcctattgaagggctgatttgtggatagcatattcatgagtccagtgtgtgataaaagaggctttatacggtctctttttttgttggtgacacaaaataggtattaataaaattattccatatacttactatttggtatatttgtagctcgaactattcaaaatgattatgacgaaagtaatacatgtacatttgatatttgagaaaaagaattattattttggctcgatttcagcgatatttgacgtgctcagtgaagaggaaattgggattaccaagagtagtttattgcatgctggtatgaccgatggaagctgtaaaatgaccaaacgagccatgattatacaatcgcatttgataagatgtagtaaataactgttttacttgtatttaagtcatactttaaaggcttaaatcattttaggcggtgtcctgatcattaacagatcgagacatcgccctttttgtggcttgaaatggcgttatttcaacttagggtaacacttagggtaacacttagggtaacatctggctttgttttttgaacactttcgataccacataagtggttaattattgcaaaaaagcatgttaaatgtcggtttcgttaccccttatttagcacttttcatgtgccaaaattgatatttgttgcagtatatcaatatgttaactctagtttctttattcaactatgccattaaattacttaatgcttcaacttttcttttgaataagtttattttagatacctgatcagaattaaatccatatatatttaatccgcaggaagtgcaaaatgtagcatcaatatcatttttgtgtccattaggacagatatatttttcttgcatttttcctaatagaccactttttacagactctatttttccgagaaaagagactgttgttagcttttcaacaatttgtttcattaaagctaaatcttctgtgttatattcatcagcatttgcagataaaacctctacagctaagtttatatctttattgcataaatgaagtattctacgagcatcaaataaattacaattttttataagcttagtaatatggatattttttgtttcttcatagaagttataaacgataggtactatgtcttttttagtatatgctctaatgatatcttccagtttttgagcttcttctttcccgtcgtcacttgaaatagataaaaattctatatatctatttattatttgatttgctatttcaagaagaggatgcataattaaaaaattgatctgagatgagttgattcgtttgccatcattaattgaatctattaagtttattttggttatttcttgctctaattcatctgcaaaaattgttttgcgactatcaatcacccctgttttcaagtctatttcacaagccgtaccagatgctgatactaaaaacatggatttgtcttttcctgataattctgtaaaatcgactcgaaagccaacaatagcattgcctccaattttaattgccttttgctctaattcttttaatgcttcatcatatatgatatcaagttttcttctgtatgtatcagatcttcctccaaaaaaatccgtaaaagaggcagctatatctgaaaagacattggttccaataacaatgttactacaaatagtttttaaatatttctttatacaacatccctctattgagtttgttgtcgtcactattatatttgatttcattgcggtttaattattgtatttttgaattttactttcttatctgtatcgctccactactatattctttagtaacgcagcctaaaacaagatcaatgtgtaatattgcgtccttgggtactgggaatggggcatgtatcaaatttccatctggataggtctctcggttggtgctatatgctatgaagcgatccccttgatcctgtagttgctttgtcaccctatattcagttgtttcaatcacatagttatgtccattcatgatcaagcgtgtatcatttactcgctttaaggccagaatagatccacttgggtactctaccatactgtcaccatagtgccgtatagcggctgtagcttcagggaaccagtctcccgcatcaatccattcggatgggctggaggaatccattgttgctacacagtcatttattccaccaatagtggatacatcatcgtaaaaagggatccgatttctttttacaggtaaatcagcattatccacctcaatttccttacttataaaatctgccgattcgctttttaacttggagccatgaccagtaagaagccagtttaggtttatttccggataggttgcgattatagtcgcaataaatgtatctggaatactggtatgcagcttatccgcatctaaaaaaccacgttttagacctgtttctttaaaaaaagtttgctttgaaatacctttgtaatcaatgtattgtaaaatcctttcttttgtagttgcgattttcatcgttgtaaatttgttttgttgcgatttatgtcgtaatattgcatcgtgttacacgataacacggccataaaagtagacaattttcaaacaatttcacaatatgagtacagaaaaacagaaaaaacaattcacagaggccgaggacctgacagtgacggttgagccaagcaaagagtatgaatttctgataacaacacatctattgtaaacaaactaattaaatacaaatcatgagaagaaaaattgaactggcagacggtatagctcgtaaggagatttgcagggtattgggaatcaccggtcccgcactttcaatggcactcagtttcaaacgtaacagcccatcggcccaaaaagcacggacgatggctttggaacggggtggaatcctaatggaggagaaaccgatgtctcgtaccgtccgtatcctgaatgcgaagggagagacagaacggacgattgagggataaatataatctaactttctaaaacatatgggaatgaaaaatcaaacatccgctattatcaggattatgactcctgttcaaatacgctcctttcgtaacggacttcgtagtctggtaactcaaactctatcaaccgggcaattgactcgtatagataaagtaaagctccgccacgaatcttgccgacagagattagcacaatccctctcgctgaccaaccttcgtttttttcatctcgtacgcatggaggataatagactattttgcaaggagaacggtcaaatgctccctttaacgaatcaaggtgggatagacttggatcgactcgctctcgaaattgctcttcggaaatggtgatatcttttgctatgatatcgactataagaacaaatatatgtgacatgacgtatgaattgtatgtttgattcctacaaatgtaggcaatttaaccgagacctttgactattcccgccaagaaagttaacgacttgcaggtgtcggagcgagaccggcggcgggaacgaaataaaagaataagaatatgaaagcgaaggtgattttatatggttggtgcatcagttggttctttctgtttgtcggagccggagcgatggacaacgggaaaccggcagagggaagcctgctctgttcagtctggtttttgttcagttttcttttgatggtgaacgagaaagaatgcagcaaggaggccgaccggtttgagtcatggtttacacgtttgcttggtggcagcgataaaggataaacaatcggtttaggtttcaattaagattggtttagcatgagcggtacgcgacccgcggaacgagggtggtatcccggatagttcagtcaggtagaacaatcgaaactggtaattcaggcgatatggtcagcggttcgaatccgcttccgggaacattttgataatgaataaaacaaaaaacgatatgcctcacgaatggaataacatgatagtggtgacgaaggaagaactgataccggacttcttcccttcgtgggaagcgttgaagcaaaggctttggagagacagaaagaaaacatacggcattcatcgtgcccgtgaagggaaagggcaaggcaacaaagttctgattgcctatgataccttgcccaaagactggcgtaaacagttgggggatcctcgaaagaaggattgttccctggaacgtttcttttgggaggatctggaagccgtttcctatttccgtgatgtatgtccgggtaaatatggtacaattgatccggaacggcaaaaggaatacgtccttgatgccagtgtactgaaagcagccatccgatggcgttctgaacattatgaagaatgtgtcaagcataaccagccggtgaagaatacttataaggtactttctacggttgtcaacaatttcaatgcctggcgcggtatcaataaactgccgcaattcaagctaccgaccaaccccatttcattaaagaggaaaatcgaacgtttcgaggcggaaggctattcttccctgttgaaaggctacgacaacaacaatcgaggcaaggccgtggaacgtacactcgacttgctggacagcatgtttgcccaccagacattcaagccttcacctgccgaagtccaccgtcaactgtccgcattcctgtccggttatgtggaaatcatcagcaacgagacgggagaagtgtttgatccgaagtcgttcaacaaggtaagccagcgtactgtcaccatgttcttgaattcatggggcagctcagtggccacatcccgcaagcgtactggaaatcgtcagatccgtctgggacagtatgtaccatttgaacagctggagcatccgaaatttgcaggatcgatcatttcagtggatgaccgccaaccgcctttcgagtataaaaaaggaactcgcatgtggttttatctgggaatcgatttgggaagcgaagcaattacgacatgggtatacggcacatcaaaagagggtattatccttgacttttaccgccagatggtacgcaattatgcagaatggggattgccgctaccagacgagattgagtgcgaaagcaacctgaatgcggcttatcgggaaggtttcctaaaatccggcaacatgttccagaatgtccgtatcgaagcaaacagcgcacggagtaaacgatgcgaaggttactggaggccgcttcgttaccaggtggaaaagaagcatacgggatggatcgcccgtcctttcgctcggaacgagtccaaccaggtaggaacaaaggaaaaagagatagtgccgtatgacaaactggtagaacaaagccttcgtgacattgaagactggaacaatatggaatgcagtatttatgaaggtaaaacccgttgggaaatactttttgagaagcaaaatccgaaaaacaaccgtccgatcccgtatcgttccatcctcttgacattgggatataggacgaaaagcagcgtcagcatgtcggggcaagtccgatttagaagttccatcttcctgttggccgatggcggggaattggctaccggagacaagttgatcggatatatgcaggttctggccggtaaaaacgttgacatctactggctggacggtaacaacggcgaatgcctggccgccatagtctgtctgcgtgacacgacacgagtggtctgtgaattagtagaacagccccggacagcccgtgccaagatcgaagaaacggaggaacaggccagaaatcgtgaattgtttgcccggtaccgcaatacgctggaggggtacagcaaacggcgttaccacagcatcgaaaaagtgaccgtcatcgatcatcgggaaacgaccttgaaccgaaagttccggatgcctggtctcacacgatatgaagcggtagaagaacccaaagaaatcgaaatactgaaaatagacaatagaaatcaggaaaaggaaatcgaacaggattcgaacagtgttcgaaaatcgtttgccccaagtttaaaagatagattttgacaacgttaaaaatagcacgatatgattgagttaacagaagaatataaggtaaaagtcctttccgcccttgcggatgcccgcgaacgctatgacggtagcgattcgaatttcgcaaaaaaatacgggatcaacaaaagcgtatatagcggtttgaagaaaggcgatatcgacaggaagatatctccgggtaaatggttggagttaggaaggcagcttggcgtttccctaaacgaacgcaattggaacatggcccgtaccgacgttttcaacatgatcgaggaagatgtcctgttctgcaaggaattcagtaaatcgatgatgtttgtggatgaatgtgcaatcggtaaaacctattccgcccgctatctttcacggaccttgaagaattgcttctatatcgatgcgacgcaatgccggcaggaacgttctatgatccgcgccatcgcaaaagccgtgggtggggaactggacgggacattggaagagatcaaggaatccgccaaatacatactgaacatcctgccccatccgatcgtaatcatagacgaagccggcgcattgtcctattcatcccttttgttgctgcatgaattctggaacgggacacaagactgttgcggatggtatctgatgggttctgacggactacggaccaaattgcagaaagggaaagggacatcaaagaagcagtcctacaaggaactcttctcccgcttctcttcgaaatacaaccacatcgttcccgatgcaccggatgatcgtgcggtgttcttccggacgctgatagaaacggtattatccgtcaacatcaaagacaaacgcaaaatcaacaaaatcgtgaacatgtgtctggcgactgacagccaggaagcagaaaccggcctccgtcgtgcagaaacattgctcatcttaaatgaggaatagtatcatcatgagaagattatcagtaagtaacctgaatgcccaacggtttaaattcatgccgttcttgggagaatggaaaaggatattgggagaccaggaacggaagggttgttggctcatatatggcaaggaaaaaaatggtaaatccacatttgcccttaatcttgccaatgacctttccaagattgaaccggtgttatatatatctgcggaggaaggcaccggatcctcatatacgaaggcagtcaatcgtgtcggaattcaggacaccaatcggaattttcattcatggccattcgtctctatcgatgatttgcgtgaggagataaaaaacaaccggaaatgtgagaaaatcatctttatagataatctgacagtctatacggacttaaagaaggatgacatcattacgctcctgcaagattttccgaaggtcctttttgttttccttgctcatgaggatgaacggggagagccactgggagcaccggccacgatagccaaacaaatggcttatgcctattttcacgtaaaggggaaagcagcctatgccactgtccgcggaggtaagaatgaacgtatcgatattgatgaagagacggcatccctcattcacggagacaagacggatttttccagacaaacattacaaaattcagagatatgacaactcaaaaacgtacctacaagaaacgtaacaccggcctgttctacggttatctgagacgtataccgggctatgatccctcagaagtggagacgatcaagggtggtgtgatagagagcttcctgattggcaaatacggagcggatcatggacgaaggatcagcctgtcggaactttccgacaaggaatatgacgaactggtcatcgatttaaaaaggcaggttaacatcgcgacagacatgaacagtctgaaggctgaacttaacgagaaagctatccgtaaaggctggtatcatcgtattttcaagcaacttgcccgaattggcatcaatacaattgatggatatgaagaagccaatcgccatatccggagtcttcctatcagtcgcggacgaattctgccggccatttctatctgtgaacttccggatttgttcaaggctgtctgttcgtattgcgacaaccggttaaagcagcaacgaaaagaacaggctacagcctcaaagaattagtgttatgccaagagtaaaacaagatccggcaaaaactctttcccgcgaagaacagaagcagttggaaactttggaaagggaatacgataaagaactggaccacctttttgatcatccagacgaccgaaaggctctcgaacgaatcggatggatagaaaaaaagattctcgacatcaaaggtgaaaagcctctggaagtaaatgacgattttagataacaattgaatattaacatattaaaatacaaaattatgaacttggataatttgacaaaagaacagaaagccgaattacgtcgacagttggaagcagaagacaaggctgaaagagcccgtgtacagcaagaacgtgaaaattataaagcgatcgtggattcatgggttgaagagacaatgaaaaaattacagaatgtttcttctattctaatggatacaaaatctgatattttttcaagcagttcaaccatcattcaaatgaaaaacgaactgttcaatgtaaaaagtgatcgtaaaagcgatacgctctcaacatctgatggcagcaaaactatccgtataggaaaccggatcaatgaaggatgggacgatactgtaaatgttggagtagacaaagtaaaggcttatttgcgaactcttgcaaaagatgaaaatagtgcttcattggtcgatacggttatgggccttcttgccaaggaccgaaaaggtaatttaaaagctcagaaggtgctggaacttgaaaaactcgcgataaaatcaggagatgaagatttcatggacggaattaaaatcataaaggaagcttaccgtcctgttccgacctgccagtttattgaagcgacttttcgggatgagaacggaaaagaacataacattcctttgtccatgagtgcaattgattaatgtccgtaaaagtcaaatcaaccactctgactcctggccgctggatatatgtttgcccttgcgggtttcgatatacagtgtgccgggtggataaaaaagataacagatggatgatatattgctttaaatgtaagcagtcaaatggtaaatattataaagtcatggatgaacgattggaatttgaagatgacttcaacaacaaactgaactgccagtgcttcacaacgatccggatccaccagccggtgaggaatgccattggcgcagtgaagcaggtctatctgaaaggtgtgtggaaaggcaacgcccggatcatacacgccaccacaattacgatggatcgcatcaatctcccgatggcgaagctcgacaccggcctgtcgcccgaagaatgccagcggctgatcaagtcgctttacaagaaccgacctggcatcaactggaaaacgcaaccactggactatatggtactggagtatgtaaaggaatcgaaagaaccgagtttattttaaaagagaaaggagaatagaatgagtgaattaaaatatacattggatatcgaaccggataagtacggtacaaatcctgaaaaaaaatacatacgcaatgtcccttgtcctcgttgtaacggtcaaggaggttctttagttgaaacaggacacaatgaatcaagatggattccttgcaaattctgtgacggcaccaaaaaagtaaaagcgaccatttcaatagagtggaatgcggattatgattcataaaagaaaactcatataagaagataatataaaaagaatatgaatatgaacgaatttatgactataccaggaacaacttatattgtcactcctgatttaaaaataatcaactcaaaaacaaataaggaaaaccgttgtactaatatatctgtattaatggatgatggccttaggcacggttttagacgtgaacgcctaatctatgcggccaaaaacaatattaacccgttgcatatacctaaatatattattgtcaataaaaacggagatgggatggagaggtatgatttttataaaaagcacaaaagagggagtgtaaagtgtagatatccgtttgatgttaatgagtatgaaaaactaattgattgcctgaaaaaaaaggaacgtcctttatttattatgaattacattaaagatatagaaaattattgcaagtttcatttggaggtatcgaatgaagaagcgtacgaattagcaataagcgcgattatggcaacaattgataatgtggaaaatggcgtctttccgcaatctataataggatatatactaggaatctctaagaaaatgctttccgcaagaataaaatataataaaacatttcttaaccggctcgataaacgatatgaataaggacgacttatttaaggtgtttttaataaatgacctgatggatttgcctaatgccgttactaaaattttagatatggatttagaagataggaataaaatataccgagaattgattagactgaacgataacgatttgtcttatgactggtttcaagaagtttacgaaagtgatttatctgaaagaaagcaaaaaaaacaggacttcacaccaaattctctgggagtattatgttcattgctaacatctcaaaccggaagtatacatgaacctactgccggaaatggatctatgatcattgcggattggtggcaacgttgtacgaaattattaccctgggaacatttcccatctcagaatattgtatcatgttgggaattatctgatagatcaattcctatacttcttttaaacttatcgattagaggaattatggggtatgtttatcacggggatgtattaacaaaagaagttaagcagaagtatatccttcttaatcgcaaagatgatacactttccttttcggaaataataaaagcagatactaatgccaaaatagtacaagaattatgaaattaaatgatgtatataataaatggttgtctgtcaagagaagacaagttaaggaatcaacactaagctgttatcagctcatatatataaagatactggctcctagatttggatctacagatgtggagaccatgaataagaagattgttacaacatttctttatgaacttcttgattcaggcactaagtcaaagaaatactgctcagatatccttatagtcataaagatgcttattcgctacgctggtgacgaattggacatcaatgttcccgatacagcttggaaggttatttggccaaccaataataaggttggcgtttcaaaattagaacgttacacgcaagaagaatatcgtaaaattgttgagtatgttatggataatccatcacctcgcaatttaggcattttattaacaatatgcacaggcatgaggattggcgaaatttgtgcgttacagtggcgggatatagatattgttggcaatacaattcatgtcaataaaacaatggagcgcatatatcttcctggaaatatcggtaccgacaggaaaaagacggtggttgagataggagctcctaaaactagttcatcagataggcacatacctattcttaaaaatattttacccattgtgaaaaagttctatgccgtatgtaagccagattattatgtttgcacctgctctgaggattttatcgaacctcgaactttacgtacatattatcgaatttttattcttgaaaaagtaaagttaaatcattgcattaaatttcatggattgcgacatacttttgcaagtaccttgattgaaaataaagtcgatgttaaaactgtatccacaattctaggacattcggatataagtacaaccctcaatgtatacgtacacccatcaaatgaagccaaaatatgcgctgttaatggaggcttaaaaggaatattcagatagtttggatacggaataataagaaagaagataataattaaaaaattatgaacagcaacgcacatgaatataaggtcaatgccaccaaagtagcattgcatctgctacgagagcccgacatattcgaaacgaatatgaaattgttttgcgctaaagatcttgaagatgcttttatagctggtgcagagtggcaatcaaggcaaatggcatggataagtgtgaacgataaactgcccgaatacggacatatcattgacgatctcactatttattctcacacaaaaaatgtgattgtgctttataaaaatggatgtattggaaaaggaaaacgcatttatgtgaatgagataaataagaaaggctggcaatggtcttgcttaaaaggtgaagatattacccattggatgtatttcccggattaacgaacaattaaataaagaataatataatgaacctaaaacaattcaaatattggctaaggataaacggttttcgtccggagcagttcggaaccggcacaaagtggaatccgattaagttaacaactaaaaaaatgtgagtcatggacaagaagagattggaagctcatatgaatgatgggaaaacagaatacgtgatgtgcgcagcaattcatgtggatgatggagaatcttattcgtatcagccatacaatattgatactggcattgtgctatgtgggtggagacatcccggaatattccaacaggcagcacttttaaaaatgccagatagcagtaaagcgatacaaggatttcttactactaagaatagatttttaaccagaaaagaagcttatgcgctggttaaagaaacaggacaattaaagcagcctcttataggtggtatgttaacttcagaggatttgtggtaacaaattactaaataattatgagtgatttatacttcaacgataaacgctttgtcggctacagtaagattagtgatgtattttttctgcttccggcaataatgtggtacatggagcgagaaaggattaaagatgcagactcgctcgtgatatgtgtgcattggctttgttttcagtgcgggttatttattaggtgtaaaagaaaaattaaaataggttatgagaaagataatagcaattagtagatgccattccataggtgggggaataatgaaaaagtgtagaattaaaaaatagcgaatcatgataacgaaagaacaagttaaagaaatattgacaaaaaatccggcaggaattacaaaagaagagttgaaatttgtttttggcatattctgcttatcaatcaaagaatatgaaaaatcagaacataatctttggtttgaagtacatttcgaacgcatatacatcgctcaaattcgatatggtataaaaggtgggatgtcttttagtaacgaatatgtaaatatgggagatggatgtcatggagtaacaatgggaacagtgaataatacagccgatctattaaaaatattcatcaatatgttttacgacaatttattgaaacaagccaactatgctcctttatataacgaagagacatctcaattcgaatcccttgaacaagctcaagaatatttggaatatgttcaatctatactgtaaaatttaaaaaaacattggttgaatagaacggcaactccgctcggccgacaccgggcggagtctgtaaactctcaacagcgagttttcgctatctctgataaaaacactacaaaagtagtgctattctatgaaagaaacaaaattaccattatggaagcacttcaaattagcctttcaagttgtaacgctgcacgtttgcaaagcgagtatttcaggaacctgccatcatgtgattttttggaattcgcgactcttttcgcccaaatacacaagcgaggtagcatgtcccatctttacaggaaccttctcacgcattttcaaaattatcaacacgtcattggccgtacttttacaacgagtcagatcggtcgtgaagaactggatgatttcatccaatatttgcacattgacaaagggctgaaactttccacgatcaaaagtatgataaccagatttaaatatcttctaaaaaaggcgtatttaaaaggttgggccgttgatgactcttattccgagataagagtccgagaaaacgaatccacattcgtataccttactgaaaaggaaattgcccgcatctattactatacagaactattgccctgggaagaagagattcgggatatcttcatcgtaggatgcatgaccggacaaagatattccgactattcccgtttgtcttcggacaacatcaagggggatcatatccacatcgtccagaagaagacgaaaaacaaagcggttgtccctttgacggagtatgtgaaggagatattcgcgaaatacggcgggaagatgcccagagcccggtgcatccaatattttgacaaagccattaaaggtgtctgtaagaaaataggcatcgatgagattatcgtttacgaggaagaacgtgccggggaaatcgtagtggtcaaaaggcccaaatacgaaatgatatcctcccatacggcccgcaggaccttcatcaccaatatgaacaagaacaatgtaccaagcgcgaaaacccgtaaatgcacagggcacaaatcaaccgcctgcttcgacagatatgacagaatgacccttgaagaaaatgcaaaatctttgtccggaaacggtttcctggcatgatgactaatgagaaagaggcctaaattgtagtttagtgcctctttctttgtaaggaattggttatgaacctaactttgtaaatagattgattgattttactgtttgtccatggcctacaataatagaaatacattattgaagatgatacgcgtacaagacattgtcctcgccgaaaagaagaagggtgtctcgcaattatatgtgtatgagcatatcatccgcgatacgttcctgatctcctacagcacttttaaccgttggatttcgtatccggccaagcaggaactgaaacacgggaaaaagggacacgaggacaagcttcagctaacctttggtttttaatccgacaagtgtaaccatccagccgttatatttatgatagtgttcccaggataccggtttcaggggccgtgtctctccttcttcaaaatccagcctgtatccatttacggcatccagcacatcacgggccaacgtttcatgccacaggacatccccatcccgcatatccccgtccgattcgtcccttgtctcggaaacgacatgaaggcggatgtttatctgacatgaatttgtctgttttgtctcggcagtgatatccaaggcggcaaattccaccaggacgacaggacttgtatggatcactccttcatattggttgttgaaccattggatgtcttttagccggctgttcgaagcatcggaaacgatacctgtttccggatcaagcaggataccgaacttttcggcaatcaaccctttgatatccttatataagctgtaatacatatttttatttatttaaaattttatccaaacctttgattatgatattttccactttatcattcagttccttgctctccccgatgaattgccgggccgggagcatcactgtttttttcccgaatatttttatcggtcccccgtagttttgtacatatgcatatggcttgtcggacgttatcgagaccttcccggacttggggatataccttatactcttccttaaatcaccggaactgccggacaatattttacggattgtcgcagctttgctgaaattaagttttttctgctgttttaccttatatgtcttaccggttttcctgtcacgtttaaaacggtaggaaacgcgtttttcccctttgtagtcaaagccgtaccatttgctggaaggatcacgtcgttttacatccttccacttttttaaaccgttatcgacaaacccttcctgattgaaattctctttaaaatgagccacggcttcacgccctacaattttaggcaatgagtttttcgcccagtcctggctctcttttaaaagattgtcaaaatatttttgtatgtcagtattttgcatgtcgtctaatattagtatttttgtaacggttctaagccgaaaggccgtgagcccccttctggcaggtttgattatttcaaatctgccagtcgtattttaaagctttccgaaaggatattggcgcggtccagcctgatatctttcccattgatcacaatcgtaacggtttttatgttttccgaccgtcgcacccttgaacgtaaagctgcgctcaactcttcaacggatatgtccgaatctacccaaatcacgacatggtcagcttgcttccttgcgtcccggagcaaccggtcaatcgaatttttcgaaggggtccggctgaccttgtattcttcctcatatcccagtgtccggttgagactgtctgccgatttcactccatccggattattcaacagatcaatatcatatccgtacttgttggcaaaatatgaagccacccgtatattctcctcccgttcacctttgccgtgtccactatggatacgaagccggcctttgttggtaggaactgtttcatactcttcttcctccagcaaccgcttcaccgctttttccgctcccttgtaagcttccgtcacataaggatggttatccgtgaaaatactgcccgtataggcagggttgcggtccagaccgggagaagccggtgccaccccgtcccgtgtcgctttttctcccggaatcacgggacggtctccgatgtgggtaatcggatcagccgtgttttccatgtcgcactggcaattccatacacatcccggataatgagttttccaccaaggatcagcgagggagcggacattgccataatacatccggtgcgaaattctgggctctgcggcagaactgggcagccaacgaagattcggaaacagatcggcatcacgcatatattgccggaaacgggcggctgtccgtgcggcggaaacagccgtaacatattccgtcttgagccagtccacattatattgtccgattatggcttcggatgcttttctaaaaccgtcatagcttctcagattccctttctcatcgatcagaagggttgccaggtcattctgctcacggtgtgccttgaatgctgcgaatacggcattgttcctctttaattcacgaaggaattccggatccggatcgccgaatcttacttctgcatgaaaacctgtctcgaccgctttgtcaaggtaagagcgggtatgttcgaacaggtccggatcgatatcatcccggacatcaaatttttcgtatatgcgttttaatatggcattcctgatcgactcatccaaactgaaatccattgaaatctgttcccgcatggaagcacacgccggacagtggcaatcatacaagtgggaaacaagcccggaaaatcctaaaccttcactttccgggcctttccgaaaaaaccgatggcccggtcttcgtccggattattccgcttggcagggttcggctcgtcatagctcttgttgtccaccgtgttctcctttttatccttcaagccatagaaccggaactcgtatccgtccagcttgtagccatgtgcgacaagaaagggaaagagacggtaattgacaatatcctggatgcgtttcatccgcgccttggtgaactccgtaaggaccctttcgtgcacttccgcggttccggtccactgtccgttcttgctggttccggtctgcccgttcatcatcttggcgatctggtcgtcacaaaaatcagcaaggctcttgtaattatcgctgctttccttgctggctacggctgtaacggtcagtttttcatcactgccgatgactccaaccaggtcactgccaaaacggacggccatctccatcgctttttcccgttcttcttcattgtcggtgtccgtctcataagtgataaaaggtttcccgaacctttcgttgtactccgaccagtccgaccgtgcataagttttccatatgatttcccggctgatggattccaattttccaagcacttccggatctccgacgggcaaaaggaaaaacgccgtttcatgtccctcgtaagatatgccgtcacgatcccaagggtttatcgtgattatcttctcaaaaggacggacatgctctcttggaaagactttcacgtccacgaattcgcctttggaatcctgctcgccgaattcgataagctgatatccccaaaattcactgtccatcacaaaggtcagaaaacgcgtaaaccagggacgatccaaaagcagggtccgtttcttatccttactgtcactgcctttcttgcagacctcaaaaggctccgtgatcagaaaggcttccgccttttcatgctcgctgatgacctggctgtctttccatgtgttttcatatatatccagcaggcctgtccggtcggaattatccggatcaagggcttccagagcggccttcacgaggttattcatttccatgttgacccgtgtgggaccttggcgtttcaaaagggaagacttacgttttcggctcatgccgaacttggacgctattttgtttgtaattctttttatatccatttcgaattgtatttagatgatgtttacacagaggacacagatcagccaaaaggattatgacttcgcctcggactggaaacccaccggaacgatgtccggggtttgccggaggaatccaaaaccggaatgagcgtgctgttgtccttgccggatgcgacccggtcgatctctttcagcacgtcttcgtagtttaaccttaccctttccgggatactttcatccgggacggactgatagagaaaataaaccgtgaggacggtcatccaccggaccatcgaagcattccggctgtccccttctttcgaaagttcctttattatttgataacgtccggacagtttctcggaaatatacccgtaagccattgtctgtgcgttgagtatcttacagtcttcatcgcggatgagcttttttagtgaggcttccgatatgaaaacaaggaaatcgcatgtctgcaaataatctactaccatggtcgtctatatttgttgtgtttgtattttgcggatctaagcccgccggtttgtttcattccgggcttgttaagtttgtaaatgccaccttccacggcatcgggaccgtcatcgtgcggagcatccggaaatccaaggaattgctgacggatctcctgcatgtccggactgtgcttcaatgccttgttaaagcggatcctccccctctccgcatatgcggaaaggttttcgatgcgctccactttgtccggtttatcccgcctgtctcccctgatggcaatgctgtagcctcttttttctgcttcttcatcgtatttttcaagatgtatatcctggatgaaattcgcttccatccagtgcggacaatttctatgcgagggtatttcttccgccagagcgtaatggccgcggaccatttcaggggtggtgcactggcggcaaaacgcatcgtaaatgtcaaagtaaggaccattcttgccgatcaggacgattgccttgaaatcgttctttttcgagtctttgtaagagggatcgcaataggtgaccagcttctcgcagttgtcgattggcggcaggtcggcccagggaaggtgttcttcgcggaacacccggccaattacgatatgttggtggaacaactcgcgaagggcaatacgctgtcccatgttcttcatcttcgtcaggatctgttccctggtatatctttctttccatgccggcacgcctttttccgaaaggtccatttcgtgtgtgcgcgggttttcaagggcatatactttcagatgggttatcgtttctttcaccggatcgccttcttcaacatctccgacgatatgtgagaggatgctgcctttatggatacggttcccgatcacgacaaaacggctgcctttggtcggtgcacagccgtacaggtcacccaacacccagtccgtggcttcctgtacgcgtttttcattcttgcatatttcagcgtcatctatgtcgtcgacaataatcaggttgggacggagcgcggcttcacgtacgccacgcggggattgtccgcgaccgaatgcccaaaaaccgatcccgtcattcgtgacgaaatgcccggtgtcccatttccccgacttgtactgcggtccgtagtcggcaatataacgctggttgaacatcagctgttcctgcaaatctgcgagcaatccgtccgccttatcctcattggccgaggagaggacaacgccagtaagttttcccaaagccttaaggtacattggcaggaatatgtccatgacaacggatttggcatgttcacgcggccattctccgacgaacatgatgttgtcgttttcgacgatcaggccaactccttttttgtggaaccaggcaaaatcggcatccatgaagtcttcgaaataataacggcagaatttcgtgaagtttttcagaagggaggcttttcgcctgcctttttgctcatccgtttcctcacggatcggttcgagacggaccgtctcctgcatttctctgagccactgttcatattctttctgctcctttcggcttaaattcatctccaggctcatgatctgtttcctcccctttcctcatttaaaaaatcattcaaggctggagctacgtcacgtgccaaaacagggtagttgtccgtaaggaacttgttgatcttccgtacagtcctgaccaatgccgtccagtcggtttccttcggctttatcatgttgtagaggtcccgcaccccgtctatgtcccctttgccgatcaaccggggctccccgccatccgcctccgatttgatatactggtccttcagcttgcgcagctggaggagttggtaacggaccaggtcgcggatgtcttcatgtattgtctgcatggccataaggtcttctgtcgccttctgctcccaggccccgttctttttccatctggatatcgtctgctcggaccttttcatgatccgtgcgatctcctgtccggaaattccttccttgaacaatatgtaggcaatgtatttgtcgtccatgtcacgtgtttttatgatgcaaaggtgacggcataaatccttttggaaaagaaaagttccaagccttgcaatctttattacaacccttggaactttatttgcggcaggtcttttacggcctttacttcgctgtcgaaatcaatcaacaaatcacattaacgcgaaaaataaaatggcttatgaacttatagaaaacaaggaaaagcgcgaagctaccatacggatgtatggtgtgataggccgtgacgtggacggaaaccggatggcctatgatattgcgaatctggataaggaggctgacaccatccacatccttataaacagtgacggaggaagcgtctcgcaagggttgtcggtcgtatcggccattctctcggcaaaagcctatatccatgcgcatgtgaatggcattgcggcaagcatggctgccgtcattgcgatatcgtccgacaaggtgagcatgcaggattatgcaaagctcatgatccatgatccccatatccccggtatggaaagtgaaaaactgtcggcaaaggaccgcaaggcgttaaactccattgccgacacccttcgtaccatcctttcgagaaggggctgtgacaaggataagataacatcgctgatgaaggatgaaacctggttttccgcattggaagcacaatcggcgggcctgtgcgatgatgtggtcacgactccccgcaaggaggaattaagcaatctatccgttccggaacttttgagccggatcaataacgaatatcaatcatctaataaaaagacaaacatgaaagaaattgcaaaagctctcggccttccggaggatgcaagccagcagcagatactggatgccattgctgaaaaaaagaagacggcaaacgaaacgagggatgcccttatcggacaattgctctctttgggtaaaaagaacgggacagtaacggacaagaatgaagaccggatgaagcggctggccaatgccgatttcgagttattcgcggaaatgatatccgatgttcaggacaaagaggtagacaaacaaacagaagaggacggggaacttacccgtaaatctgccggacaaacggaaaaccgccggctaagtgatgtcctcgatcgtgtgggtaaaaaggagaaaaaaggcggaaacgacagccatgactgggattggtaccaaaagcacaatccggatgccctgcttaaaatggaacgggaagaaccggaacgtttcaaccgcctgctcaacgaatatgaatcttcaatcgcataaaagttatgaacacggaattacagaatccaatcgtaaagtggcccttcggtaaggcagacgttgtcagtttgacggccacaggaaatcaggctgtcgatatttataacaacctgacaatcgtagatggtgcaagcgtcatcgcaaccggggcacgcacccttaatcttgcgatcagcaaggacgtggaaccgggtgcccgccttgtcgtgaaaacaaggacgacctccacggaaagccttactcccggagaaggtatggcaggcaaagcgactgccggtgttgccggcaaaacaaaagttgccgaatatgtgtatgatggtgaaaaatttatccaaacggccgatgccgtacaaatcgattagaatatggcagaaataagaacgacactttattcgagcgaactacaaaagctcattttcccggacaatagtttttataagaagtctattggtgagaccggggtggctgataaaaccgaacaggtggaaaagcctgtacagacaaagatcagcaaagcgaaagagggtaaacccagttctttgcccttgtctgttgaaacgtcaacggacagcacgaaaaagtacaatacgacattgatctattgcgctcccctgcttatcgactcgcagtccgaattgcttgtcaactacaacaagcgtcaaaccaagcaggaacaacaggctgcggagatcaacacgaaagtcgccgcttatacgatggaacactggtgtcccaaattggaagcgaatattctgaaaacgacaggaagcgcacgtccgtcaaacgtgatggggttcacttcgcaaagaaaggccctgacgaaagaggaccttctgaaggttcttaacctgatgatgcgaatgggcgtttccggaatgggaggcaattggtacggcatggtgacggctgacatgtacaccgacttgctcgccatacccgaatttgtcgattattacaagacggggaacgaatcccggctgaaggaaggggttatcggacgcatccttggcatcgacatcttccagcgttcaacggaagaagggcacaatggcgtattgtacaacggaaaaactcctttaaggggagatgcggatgtgaaggattccttgctttcaggggccttgttctggaacgacaagatggtctgccgtgcagaaggaagactcagaacgatcattaatgcggaagctcccggttatttgggcggcacgatcatcgagtcgttcacccgttacggagccgacatcattcgtgacgatcagaagggtgtgattgcattgttggaagacaaggcatgattgtccactgaaggcttcaggcatgaaagtgtttgaggctttcggtatcttttattaatcactaaataaagaagacgatggcaagaaataatggagaaccgttggatggcaggaacctgatgctgtatatcaacactgcggagacgaacgaatctccggtatggcaggcgcaggcattggctaccagtcatacgatcacgtataatacggaaacaaaagaaaggttgacaaaggactctcccggaggtaacccggagaagaggatcacttcagtcacagttacgatcaaggccgatgcgctccgggcttttggcgacaaggataaaaagttgctgctgaaaaccatgaaggagaagaagaatgtcctgttaaaatatggtttcgcggaagcggacgaacaggtaggggacgattacgaggaaggggagttcgttatagactctttggaagagacatcacaggccggtgaggatgtgacgtacagtgcacaattttcatcaagcggggatgtgcagaccaaacaagtcgcatcctaataaattgtatcatgacaatgggaaaacattcaatttcaatcaataatacggaatatccctgccggctgaccatgggagccatgctggaattcaaacgaagaaccgggcaggaggttaccgagatgcagggaacggatatcgctctggtcattacgttgatcttctgttgcctggtctcttcctgtagggcagacggcgtggaactgccgttcaaggacgagatggatatggccgaccacatgtcacctgaagatctttcaggatggcaaagcgaaaactttcaggcgcaagcgacctcttgtgagacggaaaaggcacaatctaaaaaaaaaggataaccatcctggaactgcttgggctggctgtaggccgtataggcatgagccggacggatttcctacagctgacccccgaagaattcagcgagatagccgggcagtggaaccaaaatgaaacggtctttttccgcagtagttgggaacagacccggtttatggcacattgcatattgactccattttcaaaaaagaaactgaatccgacagatattgtccggtttgattgggaaaaggaaaaacaggaaaataaacaggtaaaaatagcaacgagagaagatttcgaacgtgtaaaaaaggaatatggcggatagaggtattacatatgacatattgcttcggatgcgggaccaggtttccggtgtttccaaaacgatcgacaaggagttgaaggttgtcaaacaatctgccgaccaggtagccggcagtctgaatggcatctccggtcggctgtctgctgtttccaattcatccgtgggtaacgtgaagaatatttccaatgttgtcgacaacttgaaaagacaataccaaagcctggggaaagaggctgctacggcctctgaagcattggaaaattccacaaaaagagtcactccgagattcaattccctgaatgtgtccgttcagcaggtggcaagagaattaccggcactggcaatcagtgcaaatacattctttctcgctatctccaacaacttgccgatcttggcggattcgatatcggcagtacgtaaagaaaatctggaattaatcgcttcaggacaaaaggcggttccagtttggaaacaggtcgcaggatcgttgttatcctggcaaactgcactggtggctggtgttaccatattgtccatgtatggcgaagagatttttaacgtggctggtgaaatgtcggggttgtcaaaagtgactaaaactcaaatcgacagacaaaaagaattgaatgatagtcaacagaaaggagcacaaaacgcacaagaggaactcacaaaactgaagctgctgtatcaggccagtcaagatatcacccgtcccatggcagagcgtaaaagagctgtggacgaattgaaaaagtcatatccgaaatatttaggaaacctgacagaagaagaaatattaactggaaaagctgctactcaatacaaaaatttgactaatgcaattgtatcttcagctaaagccagagcagcacaggacaaaattgtggaatatgccaaaaaggaaatagaaaatgaagctcttttgaccgaattatatgccaaacgtgaacaaatggtctcaagattgaccaaagaacaacaactactcaccgacttgagtcggacgggagaagcacaagagttccaagtaggcatcgtctctgttgtacaaggcaaggtagatgcgatagataaagacattgcacggttaaagaatgaaaatgaggatatccttaaattgcagaaagatttggcaaaaggaatcaaagtagaagatattacctttgattcttccgaaaatgaaaaaaataccaataagaacttagctacaataggtggactcatcaacaaaatcaatgaattaaaagaagtccaattaaaggcttcagaagaacaggcaattgctttggaaaaggaaattcgtctttatgaggaacgtctgaatttggttaataaaacaattattgcaggagcggaagggaatttgtcgaaagggtccacagagttattgaaggctccaaatattcaggcaatggatgtccctgcaatagaatttcctcttaagatagatgaaaagtcttatcagagagtacagcaaaagattcgtgaaagcggatatgtgtttgtgaaagaagcccagatcacagccagacagatgtccggcatactgtcgaacagcatacagggctttatggaaggatttggggaagcggttgcttcaggaaacggattagagattcttagatcattccttctctcccttatggatatgttgcagcaattcggttcggccttgatcgccgcaggtatggcatccgaagctctcaaagcgattgcttggagtggtatagggggtattattgccggttcggccttgattgcagcgactgctgctgcaaaagcggcattacaaaacataacggcttttgctgccggtggtatcgtgtccggtcctacactggctttggttggagaatattccggagcttcgaataatccggaagtgattgcgccattaaataaactccgttccatgttggagccaaccggtttatctgcaaaaagcctgtacctggaaaccaaggtcaaagggaaggatctatatatagccttacgtggagttgaacatgaaaaaaggagaacacgatgagtatgggtttgagatataaaggcggatttcacagcctgagccaagtcctgtatgaaattgagatataccaggaaggatattccggtcaagtatctgacattgctttttgtgaagatccccttgaaatcgagtggccggagacggataaactggaaccggtccagtccagcaacgccactctccagttatactcggacaatgaccggcaattcatcgacctgtatacgatcaaagccggcagcatccgtatggatgtactccgggacggtatgctgtattggtccggtacactcgatccggaattgtacgaggaaccatttgcgtacaaaacggactatggggtagaaataacgttcgcggacatggccatcctggataggctgaactggaataagactgggtttatgaccctccgggaaatcattggtgaagcgttggggctaacgggtatcaagtttcaggaaatagaggaccatatcagcactaaagtgtcccaatacgacacgggaaatatattggatgtcgtatctgtcaatttggacaatttctacgatgaagacggggaacctatgaccgtacgtgaagtattggatgagacattacgtccatttgcacttcgattgattcataaaggtggaaagatcttcgtatatgatttaaatgatatttacacgactttcgatccggaaacgatagtttgggattctgacgattccgtagtgggggttgataaggtatacaataatgttaccgtcacgttttctccatatgagaatatggatttgatgaaaggggaagtcgatcccgacagtgtccccggagacgggatggagatcaaagtggacaggactaaaaatagttcaggattaatgacatctcctccgggattccgaatagcttattccgataaggggaaaggtgtagaaatatcggacagggccgcttattaccgcatagacccgatccattccggggaagcctcggccggggtagcctggaccataacagtgacgaatacatatggtggtgatatccggcatttggaaaagccatcctctacaatcgggggaatggtgctaaaggtatccgaacgtccttatcttggttacatcggcctagacagacgcaatttcaggctgaaacttaccattgatatgctgtttgaccctcgatataatccattcgaggaagcttccaaagaaaatgaagaagggaattgggaagagcaacagaattgggcaaactttgcttacgttccgtttatcctgacacttagggataaggcgggaaaggccatatatcactgggaaaacaagttggtaaaagatggtaacagttatgaacataacgcaagtaattgccgatgggttacaggagaaggaagttggggtgatgcctggttttgctggtatgaagggaatcgtaagaatgaaagcggtttaggcggatggcaaacgaataaacagatcatcggctattaccggggcggattacctattttgtttgacaaggccggtcgaggagaatttatcgatctgcctgataagtccggatatctggaattacaagtaggatatggggtaccggcctatgattatgaaaaggaaataaaaggtcagttgtatgagcagtgtcgttggattttatacaagaatccggccataagccttgtcgataaaaattacaaaaacatcaatgcaaaggactttgaacacaaagcatggatcaaccgtgacgcaaaggaagatctgaagatcgatacaatcctggggacgatggaaagtccgtctcctgtggcaaaagggcaattgtataagacttccgattattccgtcatatcggaattttaccgcgccggcgtaacggatctgcttgaaaggttgttgatcggtactgtgtatagcaattatgcatcccggcacaatacattgtcggggacagtgatcctgcttcctgaatttaacatctatacggatgttaatgagccaggcaaatatattatcataagtgagacgcaacgtctgtacaacgacgaaagcgaaattttaatgacaaggtttgatgcagacaattatgaagggttagaatttgatggaacaatataatgtcatattaaacaaatttccggccaatcctcggagcaaaagaagattggcgagccaaggatttttcggaagtgaaagttcttcgggaggttcgaatatcggcggatcttcgttttccggttattgggacctcattactaccaatgcggccggagaagctattgaagaaggcaaggaatatatccgaacaaagtattcggccgtttctgaaaaggatgttgtagcctatggcacgcaggatgaatttcccgatatggcatttcccgttgcgacttatacgactcctggagcagtacagatcaaacagggaggcggtttgatcatcggagaagatggtattatatctgttgatcctaatttcgccggcggtggcttggacgaaaagcaactcaaagaatatctggacaggtatcattatctgactccatccagcttgttgtatggctacctatcaaacagcataagccctattatcacggcatcagatagcgttaattcggcgttaaaaaagctcgaaacgcaaattattaatttgaataaggattacgttacgctgactacggatcaaacgataataggacaaaaaacatttgaaaagacagtgctatccaaagcggatgttgtggcatacgctgtaagcgatattggcgatcttatagctatagcaactcctgatatgtacggtttggtcaaatatgacagttctgtattttcaatcaattccatcgggcagcttacattagcagacggagccggcggaggattgacaaacgtcataccatccggtaccggaaatgccgtaacggagttgtcctatgataaggcaaccaagattcttacctggaaaaaaggaagcactttcgcgcttcgcacagagatacctacccgattggggcaattatccaatgatgtggggtatattacgggtatcaacaagaatatgatacttaatgccctttccggagcaggtagtaataataaatatctggccggagatggtacgttttataccatttcttacagcgaaataagcggaacgccgaacttgtctgtatacgtcaaaaaagccggggatacgatgtccggcgatctgacaatacggaaaacggaacctgcgttgattttatcggggtctcggcagtggtcaatatacgaggcatcaggagatttagggttccgaaatggcaatactttggctgcatatttttccggcagtaataacggtacattattgatatataatgatcttatagctcacggggatgttgtcgcctattcatcttccggcataacagatttagccgtcgttgcatcgtcgtcaacttatgggctggtaaagtatgatggcaatacaataagagttaattcatctgggcagttgtatgtcgcttctggaggtgggggcggcggttctgtcgcctggaacgatattaccggcaagccatcatggataggatcgtccaagccatcttatagttggagcgaaattagcagtaaaccgtcgtggattgggagtagtaagccgtcttactcatggagcgaaataagtagtaagccgtctggacttgtaacatctgttagcatatccggaagcggtaacgcaataataaacgcatctttttcgggtgggacattgagtttaacaaagggtagtatttctggggggagtaattggaacggtggaactattacaggaaatctaactattagcaaatcaagtccgggtatagctttatcgggttctggcccatatatgtggtttggctcatattggaaacttacagtcccttccaatgattattgtttttactacaataatgacttaagggcttatctatcgtatagcagttctggaaatatgtgggtcaaagggtcattggtacaaggatctgatattaggaggaaaaatttaatgggtgatctcgaagatgtgctgtctaaaatgatggctttatctgtatttaggtactcctataaaaatgatcctgatgccacggtacggattggcctatctgctcaacaggttatccaatatttccccgaatttgtatttacggagccggatggatattattcgatggattatgcgagcatgtcggctttggcaataaaaggcatacaggagatctctaaaaggtctatgatgattgaaaatcttgtgaaagtccgtaaggactgggagttgacgaaggatcagcagattaaacatcttcaggagacggttattagattgcaaaatgaaatagatgaactgaaaggaggaactgcggcatgatactaccaaagaaagatctgacactttttcaaactgcattgaaggttggagcagtatatacgagcagcgggaaagggtacgttatccgtgatcttttccgacttgtggccgcggccaaatccggaggggaaaaaggttatgcttttcgggtagcagaaaacggctatacagatggtacacgcggctttatgattgacggggcattgccttattggaatatctggagtcctgatagtcctgggcgcttcttcattgatattgatcagcgcatcaaacttagaatgaaatttgatgcaggtaattcggccaatccttattatcgtgcatcactcggatattttgccggttacgataccaatgcggaagctccttttgttaattgtacaaatgcagctaatggagtaattgactattatccgtctttttccctgagattggtatttcttgttacttgttcagggataaattggaaatcagtgcagggatatattgatcatttctatatcaaggtaattgggacatttgcattaggcggatcagaaaatgaaatagcattgattgaaagtccgtcatacgtgaatacggatggtacaacaaggtcctataaccagcaatatgaattaaaaaatctcggcagcacgtatcaatatctccgttttgagatgtatgtcggatatactgataccggaggagaaaaaatgctttttaaagtcccttatatagagtcacagacagtgaggttgaatcaacgaaaagaagggcttagtcctggtaatttcctatggttctacatatacaatcccaattcttcatccggggggtatgaaaacgtagcgataccggattatgaaacgaaaattccggtatcaaacaaagaaatagagtttcaggccaattcagggactccgtatgatggtcgatatgttttgaaattcagtgcaaagatagttggtgactattatacggaaataccgggatatggtaccgttgatatacatggttactatgatgtccttgcaaagggctttatatacaaaaaatcaggtggagaggttaatgtagactatgagtctcttggacaaatttacctggatacaaattcggaatataataattttcagttgcagattccaacggaatgggcaagcaataaattagattctggaacattacattttttcattagaatgaagtctcaaccataaaataaagtaatatgaaacagattagcaacaaaagaacaattgcggacgtgatctatgacggtgaacagatcactttgaaaggacaagtagaaatagactctaacacaggtcaagtcaagtcggtaaacggtgatgtccgattaaaagatggtgtaacgtacatcggtaatttttcgatgctcggcatcaatatcaacgacatctcatatgtcaagtaccggaccgatacctcagaactggtggacgaaatggtacaggccatcaacaataaaacaattgaggaggcttaactatgaaagctattgaagctgtagaactatttgccgtgctgaaggacctgaagctttcgggcgtggattcttctgatcgcttaaaagtgatcagaaatcttcgtgctcttagggaagtgaccgataagtataatgcggacttggatctcgcaaaagaacgtctcaaaccggacggatttgataatctcataatgaagatgcttgaaagcaatgaggccgttgcagccggtggtagccgtactgtatcggacttggaaattgcgtcgtttaacaaacagaacgaacggtttaaccgggatttgaaagcgattcaaattggctcctacaataaggatgaaaaatgctttgaaggaggtatgaataatgagccggtagacgtaaaaatcgaatctctcacggagcttgcatttgacaagctcgttgatgccaataaggatgtgccggcaggcgcattagcagtattgtttgataaaatggtatagttatggaattacaggatttgacatttaataaagaaggtgacctgtatgtttgcgagttcgaggcaacaggaccttttaatattaagattacccgtacaaatgtatcgggagcttatggagcattgagcgttcagcagtcgttgacgggagaggattatgtccctattccgctgcctccggcatggcctcttatggccaagctggattttgagataccgaacgtacctgccggcatgcatatccggattgagagcggggcagaagtgacaaccgctaaaatagcatatcaatcatgatagggcttaacaaaatagggcttaaccaggtgcagctaaataggctgcgcctaaatgctccatttcctacatgtaggaaaatggccggtggtggcggttccagcgacggtttcccgcaacttccgggcgatgtcacccgttggtatttcggcggcctgacgaacgagatgatggcagcgatggacgatccgaggattgaggatgcggaccataaaggtcggttcttatccttcaagaatttcgcttggaaggaaggatcgggtattagtgatatttaccccggtgcactcgtctttgacggagtagacgattacggtgtctgtgataacttccccattctgactaaagaaaagggatatacggttgtggcattgagacagtggttatcttttcaagatattggatatcccactttagtagttaattcaaccgataggttggctgcttttagttttgaagattttagaaacaaaactaaatcaacatggaattggggaaaaagtgttgggctttcagattataaaatacctttactttatacctaccaaacatctacttcatataatagtaaaactatttatgctggtgctacagaagaaggaagtaacatattacaagtgtgtcgttctggattttattgtgcaaatgctgccatttgggaaatagttattctcgaccacgatgccaccgaagaagaactgaccaagatcaaagactacttcgtcaaaacctatccctggctcttccccgaccaggcatggacagtggtaggcaaaaccaacgaggacgaagatcgtgctactattgccaacattacgggcaatggtaatgatcttgtactgtctaattttgggtttgcagaaggaagcgggtatgggttgtatgcatataacttcaactcatttaatcttagagataatgtagttaagccaacagatgtaaaaaaagattcgtttagaataatcggaaccggaaacagcagcaatgttttgattttaacaaacgaatctgattctgctaactggaagatacgtattaccggtatgaaagatggtgattaccttttagttggaaatgcaaataaaagggatgattatgttaaaataaccaaggacggtgtatatactttccaaaaacagtatgtagcaacttctacgaatggtatatggtataattcttcacaagaagtagatgttttagttgaacaaatccccgaatacgaaggatacctcattactgatggggtggacgatgaaataatcagtgctaaactaattcaattcgcagataaatttaccattgttggtgattggaagtttatggaagatagaaatgataatgcaggattattgaaagcaaatcaaatttacatctataatgctacaacaggaatgaggatttatttaaaacagggttcaaaaaactatcctttttcttgtaaaaagattaacgctttgacttctgatggatgggtgtatgatgaaaaatgggataaatacaaagtttatcctattggaagtgatattgatatttcaagccgtttatttttaggtttttatagctcaaattttaccaaaatagccctaaaaaacttaggcatctacaacgatcaactcctctccaaagacgactgtatcaaagcctacaactacctccaaaccctaaaagcaaagtaacattaaaaatttaataataatcgaattatgacagccgagaagtttaaatctatttgcgaagagaaaggaataatttggaatgatcttgtccgtattagggttatcagaccaaagaaatttttcggattctttaggcaattaacaggtgtaacaatcgaaggtgcgttcaatggcagttctgcttgtgttgaaataatggctgacgatgataatggcgttccaataatgcactatattgattacgaagacattataggatttgaattaattaaaaattaattgggatagatgatacagaatataattagcaaaatcggagcagacaagctgctgcacatctcagtgagcatgattcttacgcttgaacttagccgctttctcccatgttggcaagctgcattgatagtgctgtcaatcggggttgccaaagaagtttatgacaaggtgagcggtaaaggaacggctgaatggaaggatatcattgctgattgtattggaataggattaggaagtatataatcaaaataaaataattaattggatatgaaatacgcaattgtaaacatcgtatgggcaaagtcccacggagtagaagtcctaccggaaatgaggacaagtgtagatcagagcaaggtaatcttgcatgaagagtttctatcacctttcggcgaagaggaatttccgaaatatgaatctacggacccggagtttatggagctgctggcaagcgaagaatgggctttgccggaaggtgtagagattaacagggaatttagccggttactggcccttgaccaaatggacaaggaggctaccgaaaagatcaatacatacggcttaacggcatctgaagcattacgagttaagaaccggcatccgatatggaaggttggaattgatgttaacaagggagatcgatatcaggaaggtgacaaactatttgaatgcgacctggctcaccgaacacaagaagactggcgtccgggacaaggggcacattcgctgtggcacgaagtgacggaagaacatactggtactattgacgatccgataccctataacgaaggtcacgaccccttatttgctggtatgatcctcgaaagcggtaagtattacaagcaggataatgtaacctataagtgtacacgggatagcggaatagccttggtgcaggacttatccgcattggttggtcactacgtagaagtcgcccggtagataagtttattccgccttttgtgccgggcggcatctaaattcgacacgtactttaatgacaagttattatgatttggttaatagttatttctatgttgattattgcagcctatacgaccgctgtatgcattaagcagaaaggtataccttattcaatcagtgcgactttctatgcaattgaacataaaggatggtttcgttttacaatgtgggcttgtcctatggtgttaatgccagcgatcttagaagtcagtaaaccgggtacggagtttctcgcttacctggcgttagccgggatgatcgttgtcgggtgtttccctgattacaaagcggataaatttcaacatcggggacatatagccggtgccatgatggccatattattctctcagacatgggcaactttaaacttttggcctatgctgctcgcctggctgccatatgtaggttatacggcattaagcatagttaaacaggaagaagggacattgagagataagtatatagaaacgaagcctatgttctggattgaaatattctcttttggggtgatatacctaatatgtctcatgcttagaatttaaaataaatccgcctccagactatcacagacaggaggcggcgtgtcgaacagattacctatttggcaaccattaatggtacaaaggtaataattcaaatcaaaaatgtatgggtacatctgttaaagtagtgacgttatcggcattctatatggaattttatgctttgatgtgggatatgagatggttgatgttgttgtcgcttgtgttggtcgtagcagatctgtggtacgggattagcaaggcaagaagacgcaaagaagaagtccgtattagccgggcaatccgtcgaacactgatcaagatcggtgattatatatgtgtgataatactcgctgcggtcttgggcaaagcgattgggcaaccactcggtatagattatagcataatggctgtatgctgcatgtgtcttgcttgttactgcgaactggaaagtgtcatcagcaattattgcgaatgtaaaggcatccattatcatatcagtttatggagtttggcaaaaggacttgttggtattaagagcaaagaattgcaggaagtaatagaaaacagtatcatagaagaaaataaagaaaatgaaaaagattgacacaattatcatccattgctcggccacccatgccggacaggatatcaaagctaaggatattgatcgtatgcaccgtgcacgcggtttcagccagattggctataactatgtaatcaatttggacggaactgtagaaaccggtcggccactcacgatcgcaggggcacattgtatcggttacaatgatcatagcatcgggatctgctatatcggtggcattgatgctaacggtaaaccttccgacacccggaccccggcacagaaagcggcaatggacgatctgataaacgatatttgtcaggtgtacgacatcgtcgaactgctcggacatcgcgatacgtcacctgatctaaataatgatggcgtagttgagccgtttgagtttatcaaatcatgtccctgtttcgatgtcagggatgagtacaaatcctttctcaaacctataattgttaaaccgtaatctctgtgatttatggataaagaatcaaaaaacgaattgataggcgggttgattgggttagtggtaatagtcctgttctgcttgcttacatcttgccgtacgcaagtccgttatgtcccggctgaaacggtcagaattgatagcgtgttctttaactcgacccggatcgatagcgtgcttatacatgattcggtctctgtaatccaaagaggcgataccgttgccgaatatcggtacaggtacatatacaagtacaaggacagggtagacacgctatatataaaccgaacagatactatccgagtgccatacccggtcgaaattgaaaagaaattgacagtttggcaacgaacgaaaattgaggtcgggggctgggctatagctgttatcattgttacaatactgatcatagttggtcggatggtctacaaactaaagaaatagctttttgttcatagtcgctctttttggggctttagagataaaagaaaagcccccaacgttttctaagttattccccaataaattaaaaaagacataaataaacgtccgcacgttggaggcttgatatcttcaacgcgaacgtttatttttgttttaaattctatttattggggtacgacaaagataaacataaaaattaaaacaatatgtgcaaatcggaaatctttgccactataatgaaagtcgtctccacggagacggaagtatcagaatctctgatactgtcagattgtaaatcaacagacacagtggatgctcgatatctattggtgtattttctctcacagagcggattatatccaccttctatcgcctcctatatacacaaaactaatcgatcggtaaactatattttggctaatttcgaaaaccgtttaaaacaaggaaaaataatgagagtatatatggaaaagataaagaagtctttaggaaataactgattccctacctgtttttatgattatagttttgtgatgcggttaatgttgaccgtaattcaatgtaaataaaatggaagcagaaaaaattatttgttgcgacagaggcgacaacgacaatgcgcttgcagctgctattttagcaggtaacaaccgtcgggacaatgacgggctgtatgctctgttagctaatcagcgcaacaacaacgatccgatggcgatggctgctatgatgaatggcggcatgggcggacagtggaacaaccctttcatctaccttgtatggatgatgtatgcacaacgtatgtggggtaacggttgtggggaaaacggaggatgcaataatccgcaaattgcagccttacagaaccaaatgcaggataatcacaacagtgacctgatcttacagggtatcggaaataacaccggtgctgttcgcgagcttgctgctaaccttaattgtgacttcaacacattgaactctgcaatttgtgatgttcgtgcaggtattgatcgtctggctgggcaggttggattctcggcagaaagagtaatcaatgctgtgaacatgggtaactgcaacgttatccaggctctgaaagattgctgctgcactacacagaaagcaatactggaaatgggctaccaaaaccagttggcaatgtgtcagcaaacaggagaattgagaaatggccagcgtgatatcggcgttgccatctcgcaaggattcgctgctacggctttccaagcacagcaggataagtgtgatatcatccgatccggtcaagacaatacgcagcgcatcattgacacgctgaacaaccattggaaccaggatttgcaacagcgttataacgatgcccgacttgaactcagtcagcttcgtcaaaacgcaacacttattgccgcattaggcaaaaccacaacgactgcctaacaaaatgtttaaccgattaagccggaggattttcttccggcttaatcattaaaaagataggttatgttattcaaagatttaaaacccggctatccggtttacatacttcaaaaagaaaatgaaccaaaagcatttcaaggaaaaacgatcaaagtttcggaaccttatttcccgcctgctcctatcggtcagctgccgtccatgagcacaacccagcgagttgttgatgtcacgttggaggcaaatggcgtaaccaatacttattcaattccagaaacactttcggtcacatacgcaaacaatctggttctttccaccgatcgtgatggtatgctccgtgatgtagagtcaatgaaaaaccaaagtttggagattgtgaattccgttgagaagcataaggcgattgttgatagctgcgacaagatattggaggaatggaatcctgcttttgcagagaaaaaagaacaggataaacgtatttccggtctggaagaaaaagtagaaggtattggaaaaatgctgtccgattttatcaacgaatttaaaaagtaaggccatgaaaatatactgtgcatttgtcaaagtcaaagaaaaggacgaatcttaccattttaacgaggaatcagctaagaaaacggtatctggtattcgttatacagacaggtctggaatggagcatgtaggtgctcactggacaccggaacagattgagatcgcgacagcctcaatgaagtttccagaaggaacaaccaagtgggacaagtatgttgcattcaattccttctatgccgatttgaacaaagttttcgatgaagcagctattctcaaagctgctcattctttttatttcgcggacgaagatgccccagttggtaaaatcaaacaatatattgacgcaatgaagaataaatagtcaatagaatattcctacggaaaatatgaggcattgttaaaaatagaatagcgtttgcacatctttcgaaaaatgtgtaaacgctattttttatacttttcgttttgaaaatttgtacttttcgttttgccaattatattaacaatcctttggtagttaaacatactttgtgttagacgcgtattttcaaaatgtaaactatctactatggaattgcgtgtttgttcatatagattggaatatttgatgagatcgttgatgtttttttctttctgagctatttgagccaagtggtacaaactaccagcacgtgtatgaatattggaactctttacacaatgattaagataaaatttagcagaatctaactggttggtggcaatgtgcagttctccttttgacaaatataaggaatagagagttttttcattaccgattaaaggctttgctttttctatgcattgatatgcttttttatagtctttgagactgagatatagattccctaaatcggtaaggatagaggctctgttttttattgcggagtatgaaattgcacgtttataatatattattgaactatctggcttttgtgtcaaggaatatatacgtgcaatgtttcttagggcaaaagcagtttttaccgaatcgggctctaactccaaatatgacagggcctttttatacatgggtaacgccatgtcgttgatatcctggtgagcatataaagtacctaagttgttataaatgttaatcaggagagtataatcttttgaatcttcgcctatctccaaagcctttaagtaatattcttgtgcctgtagagcatcttgtaaatcggaatttacacgccctaagtagtttaaggcgctgtccggttgtttttcgatggttttctccgcttcaagtagtattggagcctttggggtattattgcaagcacccatggtcaggaacaaaacgagggcaacaagcgatgtaatatgtagtaaaaacttattcatttctcttccctttagttatggattcgaatatacttgttttcgggaaaaaaatgatttatttccaataaaatgttttaatcattttatttatttacttcgatttataagaaaaaagcctattttttttgctggtacagtagttgattcgtgaaccccatccctgcaaatcactcgattattttatgcaaaaaacggctataaaataggtaaaaccgggtagtttttattgtcagataagggactttagttgccggacatccccatgttgccatccttaacacccggatgtaccggctctctacacccggatgttaaggatggcaacatgggggtgtttatagaattatgtgcttgtctttgctaaaaaaagagatagcttttgtggaatgaagaaccgtattttgccaatttaatacctattatattcgtttttacatttgtttattcgattattttatatgctttttaaaaagtagaagaaagtagtatattgatttccagttacataataaatttcatgtgtttcagacgtgatagagacgtgatagagaagtgatagaggaaaacgtcctgtatcactgcctctgacgcttgaatatgaatagctacaaccttcgtagtgatagagtgatagaggattttcaggaaacttcgtatgccgatcacaatcttctttgaaaacggagagggatactttggggggggcaaaatgtacgtgccccccttattgagttaaattaatgggatctttttattttatctgcttgaacgcttttcccagcatatccgtgatgtcactggcgatcatgctttcttctgaacggtagacggcagccaggtcaccggctgtcccgtgaaggaaaacacctgaaacggctgccgtttcgggctctaacccctgtgcgagcaatgctaagatgatacctgtcaaaacgtcaccactgcctgccgtagccatacccggatttccacaattgttgaaataaacgtttccggtagccgtacagattgctgtataagcccctttcaagacaacgcaaagttgatgatcggtagcgaaagcttgagcctttttcaaccgttcgtatgaattagtgctttcacccgctatccggtcgaattctttgggatgcggtgtcaggatgctgcgtggagggatgcgtttcaataaatctttattggctgcaatcaggttcaacgcgtcggcatcgatcacaagtggcttttctactacttggagtagctgttccagagctttgacggaatccggatgttgtcccagaccaggcccgatcgcgattgaggagtaggctttgataccggaaacagagctgaaatgatcttgatgttgatccagatcaaccatcgcttccggaaaggcagtctgcaaaatctgctcgccacgtccggggatgtggacggtcagtaagcctgctccacttctaaggcaggctttagcggataggagggctgctcccatctttccgtggcttccggcgatcagaagcgcatggccgaatgtccctttatgggcaaagcggttacggggttggaaaacagcagcaatatcttcttccgtcaccaatgtgaattgtgtcggggtgttggcaattatttccgggtgtaacaggatgtccagtactttccattcaccgacaaattctgcattttcgggaagtagaaacgctaatttcggaaaaccgaatgtcagcgtcagatcggcatggataatagcgtccggatcgttcttgcggttgtcttctccaaacaggccggaaggaatgtcgatcgcaacgacggtcgcatccgactggttgatatatcttaccatcgcggcaaatcctccggttaagggacgattcagaccggaaccgaacaagccgtctatcacgacatcccgttcttccagttcgggcgggacaaaatcgtccacgacttccgtgaattcgatcttttccatgtgaagcaaccgttgcttgtttagctcacagtcatcagaaagacgcatggttggattgaacagataagtttccacccggtaaccggcatccgtcagcatacgggcgattgccagcgcatcggctccgttgtttccttgtccggcaaatacgataatacgagtttgtttggaatagcggcggcaaaattcacttgtaaatacggttgccgcacgttctaccaagtcgatagagctgatcggttcgttttgaatggtatatttatcgagctctctgactttatctgttgagaatatctttatcataactatcggttgtctttgtttctttgtgcatacaaatgtaggaatattacttttctcttgaaagaaaagtttagcttacttttgagtcactgggattttgctgtgcatgtaatttgttttcataaaaaaacactcccgattatctgttaataacatgataatcagagagtttcttcttttgagcggtaggcgaggctcgaactcgtgaccctcagcttgggaagctgatgctctaccaactgagctactaccgcgttggatggtgcaaaagtatacaaatcttttattttttactacctttggctcaaaaaaaattagaataatttataggaatggaaaagctaacgctgataaaggtgggaggaaagattgtggaagaagaggaaacacttcgcaatctgttgaatgatttctcgcaggtagaaggatataaagtgctggttcatgggggcggacgttccgctacgaagctggctgcacaattgggtatcgagagtaagatggtgggcggtcgccggattacggatgttgacatgttgagggtggttacaatggtttacgggggactggtcaataagaatattgtcgccggccttcaggccttaggtataaatgcgttgggactgaccggagcggatatgaatctgatgcggtcggacaaacgtccggtgggagaggtggactacggttttgtcggtgatgtgaaagaggtgaatgcggatctgctggcatccctgattcatcaaggtattgttccggtattggctccccttacacacgacaaacaaggacatatgttgaataccaatgccgatacgatcgcaggagaagccgcaaaagctctggcgaaacattttgaagtgactttgatgttctgctttgaaaagaaaggtgtcttgaaagatgagaacgatgatgaaagtgtgattcccgaaatagaccgtacggctttcgagcagtatgtggaagcgggtgtgattcaagggggaatgatccctaagctcgaaaattcgtttcaggcgatcgatgccggggttaagcaggtgattatcacgcaggcttcggatattcatttggggaaaggtacacgtgtcttttaaagtgttactaaatttgttgctaatattatgttttgcaacaaatttgggttgtaaaatgataataagtaaaattgtttcgtatatttgtggtgtaaatagtttaagtgtattttttaagacgaacgttgggatactgtacaggtctgttttttggtaactaatttgcgaaggaatatataacaatatacctgtacaaaatagaagggggagcttgggagagtttccccttttctgttacctttgcttcgtgtaataaaaaggcgatggaaaataggaaaatagttgtgaatattcggaacgtcgtgacccgtttgccggaactgcgttttgaagaacctctcaattggataatagaagagggacaacaatggggtgttatcgggccgaacggtgcgggcaaaacattgattgctgacgtcatgcagcgtaaatttgcattgaaggaaggcgaagttgctttcgggtacgaggaaaatgtcagtaatatagtgaaaagtatagcatttaaggatatttactccttggccgattgccgtaattcttattatcagcaacgctggcattcgactgaaacggatgaggtcccaacaatagaagatatattaaaagaagatgcgggatcggaagattatcataaagtgttatctttgttcggcatagaagagcttttgccaaagaaactgatcttcctgtccagtggtgagttgaggaagtttttgattgttcgtacgttattgaagcatcctcgtgtcttgatattggataatccgtttatcggattggatgctccttcgaggggtgttctggtggagatgttgcagcaaataacgaagttgaaatgtgtacaggtggttttactgctttccaatccggacgatatacctgaaatgattacacatgtcttaccggtcaagcaacgcaaatgtcttcctgtttacagccgagaggaattcctgaagcaaacggatctgatagtcgatttattcccattcgaaggaaaggaagattccgttcggagcggggcgttttcacttccggtcggggaacagaaagaaccttccgctcatctcgttactttcaggatggaacatgtttcgatcaagtatggtaaccgtacgattctgaaagatctggattgggaagtgagaaacggggagaaatgggcgttgttcggtccgaacggggctggcaaatcgactttgttgagtttgatttatgccgataatccgcagtcgtatgccaatacgctttatctttttgatcgtaaacgtggttcgggggaaagtatctgggatataaagaagcgtatcggatatgtttccccggaaatgcatcttttctatatggagaatgtgccggtattgaatatcgtcagttccggattttttgactcgatcgggttgttcaggaaatgcacggagaggcagcaacaggtagctttggcctggatgcgtgtattcggtattgaagagttgaaagaccgttcttttcttacactttcttccggtgaacagaggttggcgcttttagcgcgtgcgtttgtcaaagatccggacctgattatcttggatgaaccgttgcacggattggatgtgagcaataaaaagaaggtggctgccattatcgagcagttctgttcgcgtccgggaaagacgttgatttatgtcacgcactatccgcatgaattgccagcttgtgtggataaacgttttgaattggttaaacacgcttaaggatttgtcagatgaaatacaaacttgttgccttttggttgatcgttttcggagctttgtttgcttttttgcaaatgtgtttcgagtatcatttttactatatagaacagagtcagctgtttttgttttccgaggcgtatataaggaataaactgcttcttccgggtggcttttccatgttggtggcggaattcctggtgcagttttttatccgtccctatgttggggcgttggttactgcggtcttattgacaggtgtcggggtttgtacggctggtattgtgaaacggatcgcgcctgtttcggggctttttatcctttatgtgctaccgatgttggctttgctgttcatgcatttcgacttcaattacagggtacagggcactgtttgctacctgatgatgatggctttgctctgtgggtatatgaggatacggaatgatcttttccgtttggtggcaggttgtgtgttggttccggtcttgttttggttggcaggatcgattgccgtcttgtttgccggaatggtttgcctgttcgaagggttgcgtaagacgcctaaatggtatatctcgttgatcggggttgcagaggttttgctattgggtgttggaacggtttatttctctttgatgggtgaataccgatgggtttttggtccggatctgtattaccattatacgctccatccaaaagaaatcatttattattcttggatttgtctgcctctggtctttcttgtcgctttctttatccggaataaaaatagcttgtccggaaagaaatggcgggcggggatcagttgtattgctcaattggctatgattgctgccgttctgtggtggggaatgcccaaatatagcgatgcaaagacactgaagttgaaaaaactggattattttgcccgtacggaacaatgggacaagacgatagaagaatgtaaagggaaactgacaaatttcttatatatgtgccatctgaatatggcattggccaataagggagaactttcggataaaatgttcaacttcgaccaacggggacctcaagggttgcttgtacaatggaataaatcggaaaatatctcttgcatgctcagtgatatctattttacgatgggagcaaccgcttcatcgcaggaaatggcttttgaggggtatgtgagtgctatggaggatggtaatcctcgtatgttgaagagactggtgcagacaaatctgatttacggtacgtatcccgtagctgaaaaatatatctcaatacttgagaaaacatatgcataccgggattgggcccaatcacagcgcaaatacctttataatgacgaagttgtcgaaagcgatcccatattaggaacccgtaggcggatgttgccggatcggaattcattggcaatgataaaggggttggcaggagatctggcgcttttcttggaaaaaggacctgccaactctgctgctttgcagtatttgggtgcaatgtatttattggctaaggatctggaaggatttaaagcgctggtggaaaaatattacgggacagagtttttgcccgtattgcccgtgcattttcaggaagccgttattgtgatgtctgaaaaagaaccggattactggaaacgtttcaatgtctccgaaacaattgttgcccgcttcaccgactataaaaagcaggtgcttgcgaaccgcaataacagtgctattgccgggctgttgaaccggtcgtacggaaatacctactggttttactttatgtttaaatgatgcgtaagaaaatggaaagaaagaatgtatatatatgtatgctggcggctttgttgtcttgttccgactcggtgaaagtgagccgtacattagacgcgatgcctgccatttttccggattataacggtgtggttattcctcctaatatggctcctttgaattttgctttggatgatcaggatgccggatcgcgtgctgttttttcttttggtgggcaacaattcgaggtgaaaggagaaaagggtagcattgtgattcctccttccaaatggaagaatttgctggaatcggctgccggtgactccatacaggtaacggtccaagtgaaacaaggcaatgaatgggtggcctattctccttttactatccgggttgctccagaaaaggtagactcttatttggcttatcgtctgatcgatccgggatatgagttgtggaacaagatgggaatctatcaaagggatttggagagttatacgcaaattcctattattgaaaataagatgagtggaaacaactgtgtgaattgccattcgttttgcatgcaggatccgaataagatgctgtttcatatgcgcgagacttttccggggacgatcctggtcgatggcgataagattgaaaagctgaataccaagacgaaggaaacgatttctcctttggtttacccttcctggcatccttcgggcaaatatgtggctttctctgtgaatacaaccaagcaggcatttcatctgaatgacaggaatagggtggaagtatatgacgaggcttccgatgtagtggtgtacgatgtggaaaaacatgagatcgtgacggcttcaaatatcttttcgaaagatgcttttgaaacatttccgactttctctcctgacggaaagacactctatttctgtacagcagaggctcgacctattccgcaggagtactcggaagtcaaatataatttatgttccgtctcttttgatccggtgacacgtgctttcggggcgcaggtcgatacgctttacaatgcgaagagcggtgggatgagtgcttcttttccgcgcgtttcgcctgacggacgttaccttttgtatacattatccggttatggaaacttttcgatctggcataaagatgctgatttatatatggcggaccttcagacaggcacgagccgtccgttggtggaagtgaatagcgacgatgtggaaagctatcattcctggagtagcaacagtcgttggttcgtattcagtagcaggaggatagacggtttatatacacgcccatatattgcttatgtcgatgaagacggcaaagttggcaagcccttcctgttgcctcagaaagatgccggtttctatcagtcctttatgaaatctttcaatatcccggaatttataaccggaaaggtaaaagtacgaggccgggtcttggctattaaggcaaaagaggataaggggacggatgtcaggcttgctcagcaataaggttggatagaaagaaaagaaatggtggtgtatcaaaagagctgtaatccttttttgatacaccaccataataataggcaatttctttttatggaagcgtaataagaatagaaccaccttctcctgtgtaatcaaaacctccttgcaaagcttctatgtaatagtaaggagctaattggaaagtcttgtcatctagctgtttattatttgccaaactgattcctgcaaaatcacttgggtggtgggcataaattgcatttgaggcacttccgtcataattgattccgataaagaatttattataataaataatgccatccttaatccaaaattcgatataatcgcatgaagttgaggctacagcgtttccccatccgccatcatcatttttcaaaccttgttcatatggtttcattacacgataacggtcaaagccatccgctttttgaatttctacatcgtaaggcttttctgtaaaagccaaaacgtcagcaaatgtacctgttcccaaagatacccagttatagtctttattaaccgtaactgaaactgtgttactgccacttacaggttcatttgtattatccaatgttagtgtgatattcaattctttaccaatttccaaaggagatacgttgactgtgacttttgtcatattttcaccagcagcaaaagtataatcggaaacagtacaaccggctaaggggacttcatcgaccgtagcagtcaatacaatggtcccacttgattcgctgtcggcatttgcacgtactagatctactgtaaaggtcggatcagctggtgaaaccgtgatattagctaaagaagcatttacaaaaacagctctatttgctgcatctgtattatatagagcacattcttgttcattatcacaggctgcaaagcccaagataattgatagaagagtggttaatgttgataattttggaatatatttcatcgcttttatcttttaatcaatgaataaatttatttagtatcaccgaccggattttggtctttggtctggtctagactggaatttccatcaaattcagtttgaggaattgtcaatacccacatatagctttccgggtcatttgcattgcgattaacaagcaaagcgtcagtcggccaacccatttctgcagttcgtttgaatccctgtttcaaacgacgaatgtcgtagatacgaccaaattcgccccaaagttcgatacgacgctgtataatgatttcttccaataatgaacctgtataatcagaagtcaattttcccatagatgtaccggacttttgagcacagctgtaagacgcgtcacgcttactcatcaaatccattaagtattcgcgtgcaccagcatcatttcctaaacgacattctgcttcagcagcaatcaggtacatttcttctatacgcatccaaacataatctcccatccaagtttggatatcggaaaacttaaatttttcctgctgataaccaccatctttattgttggcatctttcgggttccaccagaccaaccgttcgtcttccgttcccatttttccatacaaatctttgttgatctgtttgcgggcttttgctccgtatttatcggcatctgcatccatgtgtgtgaacaaacctgcatacataccgctttggtcagatatgatttctgccccccacataacatttggtgcgcttacgctgttcaaacctttaaattctgaaacttttgcaatcgtgcatttgcttacagcaatagcttcttccgatgattttttagcggtagcccagtcttccatcactaatgcgatacgagcctgcaagcctaatgctgtggcatagtcgatatgtgaaatgtgtttgcgggttgtaccgtttaaccgttcgacagctttattgatgtcattcataatctgagcatatgtctcttgcactgtagaacgtggttttccttctgtaccggcgactgtcggctcgacatatatagggcaacaaggttcaccctcatgtcctttataggtccgggcaaaactttgcgctaacatgaaataggagtaagcccgtattgcataggcctgccccatgatatagttgacttccgtttctgtccctgccatagtttcctctgcatcaagtatataattagcattggaaatccaagtataatagcaattccataaatcatatgagcgccaagtagtagcagtatatctgctttttacgttatataagcaatcataccagaaccagccgctgcccattgcagccatgatcatatcttctcccatcacatcggccatcagattgtaagcactgataccgaagcattggtgtgtattatctgttggagaccatgctgaatacatggaacggtaaagaccgttcagtggaactaaagccgcattggcatttgctaatagtccgcttccggacattgaatcagtcggattggtatcaagagaactttccaagcatgacgatagagtcgtacaagccaccagaccgacaatcatatatttgaatatctttttcatcttgtatcttataaaataatgatttaacattagaagttaatttctacaccaaaagagtatgttttgtttggtgtatacgaataatcggtttcacccttaaaattgtattgagggtccatacctttcaaatgagaaaataacgccaggttatcaatggaaccgaatacacggacatttcccagttttgcttttctcatccagtctttaggcaaggaatagcctaatgtgatatttttgattgcaaaataagatgcattgattaagaaacgatctgtcgttgtataagcaccgttgatttccacacgaggcacatctgtaatatcgcctggtttctgccaacggcgtagctgatgtttattccaggtgttcgtcgcatattgggcgttcatggaacctgtatacagactgtcatatattttaccgccaatcgaataggaggttaggactgacaaatcgaagcctttgtaagaaaagtctgttccaatacttccgtaaagatccggaatacggttgccttgataatatttactggttgatgcttttgaatagtcatcgctgatacgttcgttgatgatgtttccattttcatccttgtcgtatacccaatagagttgagcgcctgtagctggatctactcctgctgatttagccatatagaacgtattgataggcatgccctctttgatactgtaaactcccttgatgatttcgggtgctgtattagtcagcttcaagactttattttttacagttgatcccatccaacttatgttccagacgaaatcatccgttctgatagcggtacctcttatttcaaattcgaaacccgagtttctcatgtctccgacattggcattgtagccattgaatccggtagaagttgccatcgggtaacttaacaacatatcgacagtcttacgattgtaatattcggcattgacggatagacggcttccaaggaaggtcgcttcgacaccgacattcaagtttccattcttttcccaagacactacctgattttccaatgaagaaaccatacctccgatctggttcgaattcggccaatctaaatcatacaagctttgccataagtaataattgcttgtcttatctgaattcaggatattatcattaccttgttgtccatagcttaatttcaaagacagattatcaatccatttaacatcttccatgaacgcttctttggaaatgcgccagttaccaccgatagaccagaatgttccccaacgatgatctttatgaaaacgagaagatccatcggtacgcaaagatgcagagaaataatacttttcatcataattatagttgaaacgtcctaaccacgattcgatacgatatttgtccgtataagaatcggctgcatacaaagtcgttcccggacgcagttcaaggataccgtctaccaggtttgtttttccagccttcaaatattcgtagctgtaagcataaaattcatgtccagccaaaacatcaaaagaatgtaatccgaaagaacggttccatgacaacagttggttgaaagtataactttgcatgcgtgtgttatatttggtcaataaaccacctgctgtagcctggtttccatgatacatattcatatagctcattcgtgattggttgcggtaatcaagaccgaaattcacattcagtttaattcccttgaaaacaccgaaattatctttatctgaaccaaaagtcactccagtgcgaaggcttgccacatcattctttttatttgatttgtcgtcagtcaaaccgccgactggattgtaatccgtatagcttcccggacgtccgttttctccataatccaattgaggttttccatcttcacccaatacattctttccatccaatcccttcacatagacgggaaataacggtgaaacgaactgtgctgaataccatacatttgatgtggaagatccgtcatagtcactgtaatcctgcactgaattagacaaggaggcattcatgttggccttaaaccaatctgtaatattagaattaacgtttacacgagcattataacgctgaaagcctgtattgataagaatgccatcttcattcagataaccgagagaaaacatatattttgttttttcagaaccgccgtttacagataattggtgttcttgcctgaatgcattatctcgttgaactgcatccatccatcgttcattccaggctgaaacagcatcagcttgtaccattcctgtttcaggattgatcaaattgtcccatgtgtaattcttaaacgggttgtatagttcaccacctaaattggcacttaaaccggctcttgccatctgttgtgcttgttcccatgaataaccagagttgaatacgtaaccattacgaagagcttcataagttaattgcacaaattctttctgatcgaccatatcatacggttggatagcacgtgatgcccatcctacagttgaacgccatgttacttgagcttttccttctttaccctgtttagttgtgatcataacgacaccgttcgcaccacgcgcaccatacaaagcaccagcagaagcgtccttcaatacagtcatagactcgatatcagacggattgatggaacttaaagaaccatcgaaaggaataccatcgacaacatacaaaggatcttgtgatgcattaattgaaccataaccacggattacaatggaagcatcttcgccaggctgtccggatcctgaagttgtcaacaatcctgttgcctgtccttctaacccttttgttaagtttgtaataggacggagttctaatttttcattactgatcgtagaggccgatcccgtaaaagaactttttttagcggtaccgtaagcgacaaccattacttcgtcaagcatctgattgtccccctccaatactacatttacttttggcttgattccaacttcctgagacttcatccccacgaaggaaataaccagagtctttgcaaaacttgataatctatcaattgggtgattatcaatatgttatttattgtcttttaaagactggttgtggaaggactatcaaattgttatcttgttaatgtcttatatattagctacatattgtttttttagacattagcgagaattcttttacaaaatagagtatgacttattttctacttgtttcgtggaataaatagccatttattcatgtatataagaaaatgtaaactacctgtaaatcatcatttacggttcaagctttgtggaatatgaattttatatagaacaatgcaaaagataccgacactatctgaaatcgctcctttgacaacaggtaaactaagtcgtttcatgccatcaactaagtcaaaacaccccaagaactaaatgataacatataacaaagtatctgttagtagttactacttattacctatacgtagtactacctatggacgttatgtagtactatgtatttgcgataggtagtactacatacgaataatatgatgtatgtcttgaattagtttactatgactttcggaatagtttatgctatgttacggatcagttatcctaagagagcaggcagattccgggtaatgtgtctacagtctttaattattttcggtgattatatacaactttacactactactaaaaaataatcattgaccagcacatcttacaacctcataacaatattcataaaaatgttgttatggggttgtttgcatttccaaatatctatatctttgccctcacgtattagagttaagacgtagaagcgttaagatattatccggcattgaaatctggacaatttcatcgaacaggataatagcaaatgtttctacgcctgtgttgttgtatatcactttgcttaatacaaagggcaaactatataccagcataaggcgtggatctattgtgtattattgttcgatgggcagtccagagcctcaatgtcataatatccaatagtctccgcgctttttttatttgttaatctttcgaaggaggcagaaagagcaaaattatttcatatgaaaaagtatctattattgttagttgttctattgggtagtgtatgcgcttactcacaaaacaaaatggttgaagctattcatttaaaaaatggaagtgttataaaaggggttattatcgagcagataccagacaagcaaattactattcgcacttctgatggtagtacgtttgtgtaccctatggaagatatcagtaaaataaccaaagaagagaaagaatctaaaattccatttaaaatatccaatgaaaagtacgatttgacagggagtagatttatgattgatctcggatactgggcaggtggatacaaaggcccagaattatattttacatatggaagccaaatcaatcaatatttatttgtaggaggtggaaccggcatacactatatgaccgattattcaacagtaagcatacctgtatttgcggatgtgagaggatatgccttgaatggtccaatatctccttttattgcattaagaatagggtataagttcaatacaaaagaagcaccaagacatgcaaaaaaaggtggattgtattgtaacccttttattggtgtacggtttatgaccactaaaaaacaagctgttaatttaggtataggatattctatacaaaaggtatcatttgatgaagaatggggagatggaagtggtgacatgaacggatttagtataaaggtcggatatgaattttaacaataacatgaaacaagtactacatatattattaaccttgctacttttattcacattttcgtgtaacgatgataatgtgaataatgacaataacagcatattaataggttcatggggagagcaattccccgcagatgaatttttcgaactcacattttataatgacgatacaggcgtaatgactgtatattacaatgaaggcaaaaagaaaagcccagatcctttcacatactcttttgataaaaatacaatgagattagtcattgtatttgatagtgaccctgagccacctattgtttatgatgtaaaggtgtcagaaggttggctgaaacttgattgtatatctggtgattttgaagatttctcaatgtacaaaataaagtaatacgaaacaatatgatagtaaaagcggtggtaacttagtttatcaccgctttctttttataaatcaattaattattcacttttaaaaattacagttatgaaaacaaaagaagaaaaacaaaagaagtttgtgacagaatttgaaatcaatggagaaaagtatggcggatatatttatgctacaactttttccgaagctgaagattttgttagacaaagaaaagcgacagaaaaagttgtaggtggtccgtgtctagaacaagaagaaattaatcgcctttataaccattcctcttagcattttcaatgcatccttgtttactggcataaccctgagatgatgatcctacaattcttccattggaagaatatcttctccatctccatttaccactgttatcaaggtaaaattcaaaacgatcatttgtttccatgatattagtattattaagttagacaatcctcaaaaatagaaaagaattagatatttaacaacaaaaaaaataattcaaaatcagatattcgatgaatttaattgatttttagttggttatatgaatatatttttgtatttttataatctaatataaaaataagaagtatgttcgattttaaatcacttcccgaattttcaaaattgttccctgatgagcaagcatgtataacctttcttgaaaaagaaaggtggggagatcacgttgtttctccttttgatccggaatctaaggtgtataaatgcaaaggaaataggtacaagtgtaaaaacacgggtaaatacttcaatgttcgtacaggaacgatttttgaaaattcaaaggtttcattacgaaaatggatgctggcttgttattttgttgttgaaatgaaaagaggagtatcatctttacagttgtctaaaatcgtgggagtaacacagaaaacggcttggtttatgcttcaacgtattcataattgttttagtattgaaataaaagagccgtgtttgaaaggcgagattgaagtggatgaaacttatattggtggcaaaaacaagaatagacatagtaaggataaagttaaagatgcacaggggagatctttaaaagataaaacccctgtgtttgggacactccaacgagaaggatttgttgtcgcttatgtcgttacagacacaaaaggtaaaaccttacttcctttgatatacaataccgttcatcctaattctaccatatattctgacgaatggtatgcgtataacgggatcaacaaagaaaagtttgatcatcaaaaagtatatcacaaaaagggagcgtatgtaataggcagaagatcaacaaacacaatcgaaggatattggagccatttgaagaaaatgatttctggaacccatttctgggtgtcgagaaaacatcttcaaagatatgtagattgcgaatctttcagatataacacgaaacatctatcggaatctgaaagattcgatgtatttttgcagaataccaaacgacgattaaggtattcacaactaaagaaaattacggcatgaaaaaaaataagaaattcacaatatcaaccactactacgatcagaagtagtaaaagtggaaaattagagaaggatatgaagagaatagctaaaggtgtatttagctataatcccaaaacagatcctaacgaccctctttttgataaaaccacctctaaaaaaggtggtaacgaaaaagaattttaaccatataaaacagaagccggatatacgttaatcattatccggcttctgttttatatagatggtgtaaagttgtatataatcaccttattttctacccttgtagacccgaggcgttttttcacccttcagaattgtccaaaaacggtacttaggcgagaggttaaaaatagataattttaaaggaggcgaaatcaaggagatttcatgagagatcaatctaaaatatcgattttacatgatcttttgttaattatcatccccatttttgtaaaatcctattagttttttagttgttataataaatttattattacatttgccatctcttaggaatatttatacattgcttatatgtataaaaacagatagtgcaaattagttatttataagttaaacaaaaaaagtgtgtctatgaaaaggttaactttccttttattctgcctattattaggtattgggatggccaacgctcagacgacgaaagtaacaggtactgttatttcggcggaagacaacgagcccatcattggtgcatctatagttgttaaaggtacgactataggtacagtaacagattttaacggtgcattttctctggatgtaccaagttctgcaaagactctggtagtttcttttgtgggtatgaaagcccaggaaattggggttaagccgaaagtaaatgtggtgttggagggggataatcaaatgcttgatgaagtgatgattgtcgcttatggtactgccaagaaaagtgcttttacaggatctgctgcaacaattaaaagcgagaaaatcacctctcgtcaaacttcgaacgttacgaatgctttgagtgggcaggttgctggtgtacagacaacgagcaatagtggacagccgggtaaagatgcagaggtccggattcggggtatcggatctatttctgccagcaataaacctttatatgtagttgacggtgtcccctatgacggtgagatttcggcgatcagcacttctgatatcgaatctatgactgtattgaaagatgctgcttctaatgcattgtatggcgcccgtggtgctaatggtgtaattttgattacgactaaaaaaggtaaaagtggcgaagctcgtgtcagtcttgatgcaaaatggggtgtgaataaacgaggagtacctaattatgaaacaattaatgaccctgctaaattttatgaattgaattattcttctatttataatgcagacttgaaaggttatgccgcagctggtgatctggccggtgccaatgcatatgctaatcaagctttgctttccggaacttatttaggatatcaagtctattctgttccgacaggagaactgttgatcggtatggatggaaaattgaatcctaaagctacgcttggttattccgatggaacctattattatattccggataattggtcggatgaaattttcgaaaataatgttcgccaggaatataatttaagcgttagcggtgcttctgacaaaatgaactattatatgtctgctggctatctggatgatcagggtatcgttcctaattcaggttttcaacgttattcagctcgtttgaaggcggattatcaagtgaaaccgtggttgaagttgggtgctaatgtttcatttactcactatgatagccgtgagcaggatacagaaggcggaacttcaaatgcgaacatattttatgcctctaatattatgggggcgatatatccgatgtatatccgtgatgcacagggaaatataatgactgataaccgtggcttccaacgttatgattatggaaagaaaggacaagatacgaatggatctcgtaatactatccctaatgctaacccgttggccagctatatgttggacaagatgaaatattccggagacgtagttagtggcaaatggtttgcagatgttgatatctggggtggcatcaaggccaaggtgaatattggagtggatgccaataacgttcggaataccgatatggtgaatccgttctatggacaatattcggaaacgacaggtgtcggtggtttgatttctgtttcaacccaacgtacattcagtgttaatcagcagtatttattgacatacaataaaacgtttgatgatgtacacaatctggatgttttagccggtcatgaaaattataactataaataccaatatttgtatggccagcgtgaaaaactgtataacccgaatgtcccggaattggataatggtatttcaaatcagtataattcatcttattcaaaagattatgcgactgaaggttggttgttccgcgttcagtatgattatgatgggaaatatttcggttcggcttcttatcgtcgtgatgcttcttcttgcttccatccggataatcgttggggcaacttttggtctgtcggtgcaggttggttattgaataaagaagctttcctggaaaatcaaagttggattaatatgttgaagtttaaaatcagttatggtttgcagggaaatgacaatttgatgtatcaaggtggtttgtatcgtaactactatccgtatcaggatcagtttactttggcaaacagtaatggagatttctcaacttctctatattataaaggaaataaagatatcacatgggaaacttcccatagttttaataccggttttgactttacgttctggggaggcaaactgagtggttctgcagagtacttctctcgtaagactacggatatgctttatttcaaaccggttgcggcttcgatgggatattcccgttttccggaaaatgtcggttctatggtgaaccgtggtgttgaaatcgatttgaattcgaatattatcgaaacaaaagatttctcatggagcgtaaatttgaatttgactcatttcaaaaacaaagtgttggagctggcgcctgagctgaatggccagatgattgatgcaggtcgtatctatcgcgaagatgaatcaatgtatcagctttatttaccgaagtatgccggtgtaaatcctgaaacgggagaaagccagtgggctttgttgaagccggatgctgagggcaacacggttacgacttcttattccactgctacagaaaaccgttttgcgacaggagatatccttcctaaagtatatggaggattcggtacaagttttacggcatacggttttgacttgtcgatctcatttgcctatcagctaggtggccgtattttagactacacatatcaggaaatgatgagcccggctgctacaggtagtgctttgcataaagacatgctgaatgtatggacttccgagaacaagaatacggatgttccccgtatgaatgtaaatgataaatatacaaaccggttgtccgatcgctttttgacaagctctgattatctgagccttcaaaatataacattcggctatactctgccgaaaaacctgactcgcaaattacagattgaaggcgtgcgtttgtactttgttgcagataacgtcgcattgttgactgcccgtaaggggctggatccgcgtcaaggttatgtcgcttctgataatgtttattcgccgatccgtacaatttcgggtggtatatcattgaatttctaatccgttaaattgtttttgaatatgaaattaacaaacaaatatatgatgttcgcaatagccgccctgctgctggcatcttgcgatttggataaatatcctgaaggtcaatatgtttctgacaatcagaaagaagaaacgatcaaggacagaccaaatttggtcacggccgaagtaaatgccatggctgctaaattgaatgcttacggaacgatttccgatgatgcgacaacctatcataatgattatggagtcccggctgtctctatggcgttggagtctggaggacaggatcttgtagcactggttacaggatataactggttcaatacttctcagaattattcagaccgtgtttatgacagttctacagatgaactgatttggaaaactttttataatcatctgaaggccgcaaatagtgtattgagcttgattgatcctgctacagaagatgcttctttgaaaatctatcgtggtcaggccttggcagctcgtgcatacgactatttgaatctggttcagatttatcagtttacttatgcaggtcatgaaaatgctttggctgttcccattgtaacggaaaagatgtctgacgaagaaatgcagaacaatccgcgtgctactgtccagcaggtatatgatcagattatgagcgatttgaatcaggcagcagaattgttggccggttttgataatggagcgaataaagaccaattggatgaagcggtcgtatatggcttgcgtgcccgtgccaatctgttgatgcagaaatgggctgatgcagcaaaagatgcagaaagagctattgccggcggaacaccgcaatcattggcagaagtatctactccgacatttaattctgctactgcaaattcttggttatggggtgtcatgatcactccggataatgatgttgtacaaaccggtattataaactggccttctcatttgtgttcttttacggggaatggatatacttcaggtgttcctgacggatacagaaaagtgaatacggatttatatgaccagattccggatactgatattcgtaaacaatggtttttgtctccggataacacatcttcgttgatagacaacgaaacaatagaaggatcttctattgttgagtatttcggtcttgaaccatatgtaaatactaagttcggtgcttatcagagtgtgtttgggaacacgactaatgcttcggattggccgttgatgcgtgtggaagaaatgtatttgattaaagcggaagctgaagcaatgagtggaaatctggcggcaggtaaatctacattggaaaacttcgtgcaagcctatcgcgacccttcttttgttagtaaagctacttcgccacagcaatttcaagatgaagtctggctgcagcgtcgtatggaactttggggcgaaggtcattcgttgttcgaccttttacgcttaaagaagccggttatacgtaaaaatacgaattatcatgcttccgtacagtttaatttggagccggaatcccagataatgatctaccgtattccgcaatgtgaaatggagaccaatacaggtatttctgatgcagataataatccggcggctccacaacctgctttataaaagaaataaggtttatatccggaaaaggaatgaagaggcgtgttcaaaaaacacgcctctttttttgtctctgtccgggcttttgcaggatagctttgctgatagttgttcttctattgaaacacgaaatataacaaacttttagtttgtctcatacgaaacaaagaacttattattgttccttcgtgttctcattcagaaaataatgtatatcatggaaaaagttatttacaatctggtgttcaatcggaaaaagcggttgaatgcagaaggaaaggctttgattcaggtagaggcttacctgaataggcaaaagaagtatttctcaacgaaaatctatgttaagcccacacaatgggatagcaagagaaaagctgtgaggaaccatcccaatatggatgaactcaatcagtacattgaggattatattacttatttggaacggatcgaattagatatggtccaaagcggacgtccgttttctttgaagtatttgagggaaaggggagattttgaatccgtctcttcctcttttgtctcttttatgaaaaatgagatcaatcatagtaacttaagactttccacattgaagaaccatttatccactttgcaggttttgtgccagtatcagccacaagtctcttttgatgatcttacctttaatttcctttgtggttttgaacattttcttcttgagcaaaagtaccaccggaatacgattgccaagcatatgaagcatctgaaaagatatgtcaacctggcgattaataaggatttgtttgaattgcagaaatatccttttcgtaagtataagattaaatatatggagagcaagcgtggtcatctgacacctgaggaattgggaaggttggagaatatcgctcctaaattgcaacgaacgctcagacggacgcttgatatgttccttttcagctgctataccgggctgcgcttttccgatattgtcaatatacgaccggataattttcatctgatcgatgataagttatggctggtctattcatcggtcaagacggatgtgaacgtccggcttcctttgtttctgctattcgacggaaaagctcttgctgtttatgaacgctattgcaagcgttattcaagaacgttgtttggagtttctgtttcggcaaactcgaatgtgaataaacagttgaaaaggatttgccggctggcggaaatagataaaaggttgtctttccacatggcacgccataccaacgctaccttattattatataatggagcgaatatcacgacagtccagaagttgctggggcataaaagtgtacggacaacggaaatctacagtgatattatggatatgactgttatacgtgatctggaaaatatcacattgaaataaaataaggtaatagatacggggggcagtgcattctctgatacacactgccctgatctttcatgattttattcagtgcccaagagttgtaaatatgacaaaatgttatcttattatggtttttataggtgtgtgctgccgtgtgtgcttactttttatcatattttctgttgtcaaacattaaaatagccttgaatttttactgtatttatactttgaaaagtaaataaaatatgcgacttttgttggcatgatgagtcaaccgttagcagagagattacgtccgaaaacgttggacgattatatcgggcagaaacacctggttggtccgggggctgtccttagaaagatgattgatgcgggtcgtgtcccctcttttatattgtggggacctccgggagtaggaaagactacgctggcgcagattatttcgaataagctggaagctccgttctacacgttgagcgcaatcagttcaggagtgaaagatgtgcgggaagtgatagaaaaggcaaaaggcaatcgctttttcaataccgtttcaccgatcctgtttattgacgaaatacatcgctttagcaagtcgcagcaggattccctgcttaatgctgtagagacaggtgtggtaaccttgatcggagccacgacagagaatccctcgttcgaggtcatccgtccgttgctttcccgctgccaggtatatgttttgaaatcattggagaaagctgatctgttgaccttgttgaataaggcggttaccgaagatatcatattgaaggatatgaatatcgtgttggccgagacggacgccatgttgcgttattccggtggcgatgcacggaaactgctgaatatcctggagcttgtcgttgctgcggaagaaggaaatgaaaagattgaaataacagatgaaaaggtggtggagcgcttgcaggaaaatccggcggcgtacgataaaggaggggagatgcattatgacatcatatccgcttttatcaaatccattcgcggaagtgatccggatgccgctgtctattggctggctcgtatggttgccggtggcgaagatccggaatttatagcccgccgtctggttatttcagcatcggaagatatcggattagcgaatccgaatgctctgttgttggcaaatgcgtgttttgatgccttgaagaaaatcggctggcctgaaggacggatcattttggcggaaacgaccgtttatctggcatgcagtcctaaaagcaattcggcttatatggcgattaatgatgcgttagagttggtgaaccgtacaggaaacttgcctgttccccttcatttgcgaaatgcaccgacaaaattgatggcggagctgaattacggaaaagattacaaatatgcgcacgattatgaaaatcattttgtcaagcaagagttccttccaaaggagattttaaacgaacggctgtggaaaggacaggaaaatccgtccgaacacaaactaattgaacagatgaggcgtttgtggggagatagatatcagaattgacaattgataatagacaattgacaattggggaataagtgtaattgataaagataattatcatgtcgttttgctaataattatcaatcgtcgattgtcaattgtcaatttattttgtacattagccgcctgtttttgggaaattagttacttaaattatatttaacattaaaaaaaacattggtatgaagaagcacaatttttatgcaggtccctctatcttgagcgagtatacaattaaaaatacggccgctgcagtagagaattttgcgggtatgggtttatctcttcttgaaatctcccacagaagtaaagaattcgttgccgtgaacgatgaggcgcgtgcgctgatcaaagaattgctggatgttcctgctggctatgaggttgttttcctgggtggaggtgcaagcatgcagttctgtatggttccttacaacctgttgaataagaaagcttcttatttagataccggtacatggtcgtccaaagccatcaaggaagctaagctcttcggggaagtcgaggttgtggcatcttctaaagataaaaactatacatatattccgaaagattatacgattgccgacgatgcggattatttccatattacgaccaataatacgatttacggaacggaaactcgcaaagatccggatgtgaaacaacgtttggtcgccgatatgtcgtccgatattttctcccgtccgatcgatgtatccaaatatgacattatctatgccggggcacagaagaatctggctcctgccggtgtgacgttggctattgttcgtgtggatgctttggggcatgtggaacgcccgatcccgacaatgttgaactataagactcatgtggacaaggattccatgtttaacactcctcccgtgctgccgatctatgctgcgttgcagacattgaaatggtataaggaacaaggcggtgttgccgctatggaaaagaaggacatggaaaatgccgctatcctgtatgatgaaatcgatcgtaacaagttgttcagagggactgttgcagccgaagaccgttctatcatgaatgtatgtttcgtgatgaatgacgaatataaggaactggaagacgaattcagcaaatttgctgcggctgccggtatggtcggtatcaagggacaccgctctgtcggtggtttccgtgcctcactgtacaacgcaatgcctaagagcagcgttgaagctttggttgcatgtatgaaggattttgaaaaacagcattgattatggcaaagatattagtagcaacagataaacctttcgcagcgatagctgtgaaaggtatccgcgaagtagtggaaggggcaggcgatgaactgatcctgttggaaaaatacggtgaaaaggccaaactgctggaggcagtcaaggatgtggatgcaatcattatccgcagtgacgtgatcgatgccgaagtgctggatgccgccaagcagttgaagatagtggttcgtgccggagccggttacgataacgtcgacctggctgctgcgacagctcataatgtttgtgtgatgaatacaccggggcagaactccaatgccgttgccgaattggctttcggaatgatggtaatggctgtccgcaacttctataacggaacatcgggaacagaattgaaaggaaagaaattgggaatccacgcatacggcaacgtaggtcgcaatgtggcccgtatcgcaaaaggtttcggaatggaaatctatgcattcgatgctttctgtccggcttcggccattgaagcggatggtgtgaaaccggtcgcttcaccggaagaactctatgctacctgcgatatcgtttctttgcatattcccgcaactgccgaaacaaagaactccatcaattacgctctggtcggcaagatgccgaaagggggcctgttggtcaatacagctcgtaaggaagtgatcaacgaagccgaactgatcaagttgatggaagaacgcgcagacttgaaatatgtaaccgacatcatgcccgtagccaacgaagagtttgccgccaagtttgccggccgctatttctccactcctaaaaagatgggtgcacagactgccgaagccaatatcaatgccggtattgccgctgccaagcagatcgaaggcttcctgaaagaaggatgtgaaaagttcagagtaaataaatagatttatctaaattatcatggcacgaattaaacctttcaaaggaatccgtcctcctaaagatttgatcgaacaagtggcttcccgtccttacgatgtgttgaactcggaagaggcacgcgaagaagcgaagggaaatgaaaaatcattatatcatatcatcaaaccagagatcgactttccggtcgggacggatgaacacgatcctgccgtttatctgaaagctgccgccaatttccggatgttccaggaaaagggctggttggtgcaggataaggaggaatgttactatgtgtatgcccagaccatgaacggcaagacacaatacggcttggttgtcggtgcgtatgtgcccgattatatgaatggcgttatcaagaagcatgagctgacacggcgtgacaaggaggaggaccgcatgaagcatgtccgggtgaataatgccaatatcgaaccggtgttctttgcttatcccgacaatgccgaactggaccagattgtcgccaaatatacatcccgcaatccggaatatgacttcgtcgcgaaagacgacggtttcggccatacgttctggatcattgacgagccggctgatattgcccgcatcacggaactgttcggcgaaatgccttccctgtatattgccgacggccatcaccgttccgccgccgccgccctggtcggtgcggagaaagccagacagaacgcggctcataaaggggacgaggagtataactactttatggctgtctgtttcccggcaaaccagttgacgattatcgactataaccgtgtggtgaaagacttgaacggcttgtcggaagaggaatttctggctaaactggaaaagaacttcgtcgtggaagaaaagggcgcggatatttataaaccggtagctttgcataatttctccctctatttggcaggaaaatggtattcgttgacagccaagcaaggtacatacaacgataacgatccgatcggtgtcctggatgtgacgatctcttccaacctgattttagatgagattctgggcataaaagatcttcgttcggataaacgcatcgatttcgtaggcggtatccgtgggctgggagaattgcagcgtcgtgtggacagtggcgagatgaaggtcgcgttggcgctttatcctgtcaccatgaagcaattgatggatattgccgataccggtaatatcatgcctcccaagacaacctggttcgaaccgaaactgcgttccggtctggttatccataagctcgaataaaatgatttcacattcacaagcctgcttgatgcttgtgtgatgccgatttacagtgaaggctgagtatgcggagggtgatcccgcctgcatacggccttcactttttttatttggttgttcggacacttttatgtaagtttgtgagtattacgcaaagaatatgaaaagaatcagaaacatagtatttgatctgggaggcgtcttgatcgacctggaccatcaccaggctgtaagccgatttgaggaaataggagtgaaggatgcaaaacagttgctcgatccttatgagcagaaaggctttttccttgaactggagaatggaaagatcgatgtcgatactttctgtcgcaagttatgcgagcataccggcaagcaactttcttatgatgaaatcaaatatgcctggatgggttttattgccgatgtcccgcaatacaagttggatttcctgttagagctgcgaaagaaatataaggtttatttgttgagcaatacgaatccgattgtccagtcgtgggcgaggagcgaggcgttcacccccgccggtcgtcctatatccgcttatttcgacaaaatgtatacttcctatgaagttggggtgacgaagccggatgccgccatcttcgaccggatgatagaaaatgccccgcttattcccgctgaaacgctgtttgtcgacgatgccaaatcgaatatagaggttggacaagggctcggtttccacacctatcagccggaaaacggagaggattggcgggaagctgtcctgaatatactggcaaagtaatcttccagtctgtttttgggggagatgtctcatgataaaaaagctatagcctgtttctaaaaaggttatagcttttttcttggaaagctatggcttgtaaacggaaaacctatagctttttggagggcttggaacgttttttaggcccccaaatatagaaaaggacaatttgaccgcaatatttcccctacactttttggaagcaatagatttatgaaaatattgtatgtgcttgataaataatcgtttagatgatttttctaaacctttgcctttcttttccgtatggaggcagtgcatgctaagagtcaggctgttcaaatgggttggaggtgtgtggaggagaatgtgtttttgtccggatttggttttttcttcgtcaggtagctcgctatttaccgttcgctatttacaaggagtattgcggttgtcgtgtaagaaaatgaggcttgtttgaaaaagtgtaggggaaatattgcggtcaaattgtccttttgtagggatggttattttcaatatattgatatacagtgtgctgtctgatgataagcttgtctttatactgtatacacctttccaaggcttcttaatgaaaaaggggagccgatgggtttaataatgaactttggccccccttttttgtatggtaacgagaaatattccgattacatgataccgcgttcgcgcagtctttcctgccatttccaggccgaagccaatgtgtcggccagtgtttctgtcgctttccagcctaaaactttattggcacgttcgggattggcccaaaccttttcgatgtcaccttcgcggcgtcctacgatcttgtgcgggactttaacgcctgttgcagcttcgaatgtgttgatcagttccaatacggaaacaccgttgccggttccgaggttgaagatttccacattatccagagacttgccacccaacatgcggtccattgcgatcacgtgagccttagccaagtcgacaacattgatatagtcgcggatgcaggaaccgtcaggcgtgtcatagtcgtcaccgaatacactcaactctttgcggatacccatagcagtctgtgtcagatacgggatcaggttctgaggaacgccgttaggcaattcgccgatctctgctgtcggatgcgctccgatcgggttgaagtaacgcaggatgatgctcttgaaaggagcgccggcatggatcgtgtcgcggatgatctcttcgttgatctgttttgtatttccgtatggagaagtagccggtttgatcggagcgttctcggttacaggcagattctcagggtcaggctgcccgtaaacggtacaggaagaagagaatacaatgccttcgatattgaattccggcatcagttccaacaggttcaccaatgtcacaacgttgttacgatagtatttcaacggttgctgtacggattcgcctactgctttgctggcggcaaacaggatgatccctttgattcccggatgagctttcagtgcttcgcgggttccttccttatctttcaagtccagcttgatgaattcaggacggatgcctgtgatgcgttcgataccgtccaatacttctatattggagttagacaggtcatcaatgatgacaacttcataacctgcgttctgcagttctactgtggtgtgtgatccgatgtaaccagttccacctgctactaaaatcttctgtttcatgaggagagaaaatttatgatttatgatttatgaaaggatttatgatttatgatttatagcggcaagcggtgttacctgttattatcaagcagtattacctgttattataaatcataaatcataaatctttaaacgatccccgagaatcccataaacgccatagccagcaggccagctgtgattagggcgatcggggttcctttcatgccatcggggacatttgtcattgctaattgttctctgacacctgcaaagataatcaaagctaatgcaaatccaatagcaatagagaatgcatatactacagattctaataaattatactgtttctggatgacctggatggcgacacccaacacacaacagtttgtcgtgatcagcggaagaaacactcccaatgcctgatagagggcaggagaaactttcttcaggatgatttccaccatttgtaccagagctgcgataatcaggatgaagctgatggtctgcataaagcccaggccgaatacatccagcacatatttttgtacgaggaaagtcacgagtgtcgcaatggtaagcacaaatgcaacggctgctcccatgcctattgctgtatccactttcttggatacgccgaggaacggacatatacccaagaattgggacaacacaacgttgttgacgaatacagcggcgataaatatcaatatatattccatatcttaccttgttttatgctttacgcagtttattaacaatagctatcaggaatcccagtgcgatgaatgcacccggagccaatacgaaaatcagcgagccgaactgttccggcatgattgtcaggttgaacagtttacccgtccccaacaattcgcggatagctcctaacagtgtcaaggcaatcgtaaagccgagaccgataccgattccgtcgaaagccgaggccacgactccgttcttggcggcaaaagcttcggcgcgtcccaacacgatacagttgacgacgatcaacgggatgaacaatcccaaacttgcgtataaggcaggaataaatgcttccatgcacatttgcacaaccgttacgaatgtggcgattacgacaatgtacccgggaatacggaccatatccgggattacatttttcaatgctgatatgaccatgttggaacagatcaacacgaacatggtagcaagtcccatactcataccattcatcgctgaagaggtcgttcccaatgtcggacacatacctaacagcaatacgaatgtcgggttctctgtgatgattccgttcatcaatattttcagattactcattgtcgtttcctccctctttagttgtgttatcggatgatgtggttgctccggtcaatccgtcggcaccggaaaaagcactgtaggcgcggttcacggcgttcaggaatgcacggctggtgattgtcgcggctgtgatggcgtctatgtcgccaccatctttggatactttcagttcgccgtcagccaagttgcgtcccaatacgctctgctggttcttgtcttcgcggaaccattcctgcatcttggcgcccagacccggagtttcggcatgttgcagtacggagtagtttagcagcttgccctcggcatcgaagccgacaatcactttgatctcgccactgaaccctttctgcgtgttgctttcgacagctgctcctacgagtttgccgtctttcatcgccggatagattttcagcgaatcgccgtcagtcgtgacagccatataagcatcttctgtcggtttgttatcgaatgccggtgtgactgctttgatcgccgcttccagcgcggcggctttggtggcggcaatcggaccggtggtgtacatattcacacctgctaatattgctccggccactacacagatgatcgtgagtgaaaggaacatattgggtaatgttgattttagttttgccatgcttatttccctccgaaatgtttaggtttcatataactgttgatgagcggagtaactccattcatgatgaagatggcaaatgacataccttcgggataagaaccgaacagacggataaccgttgtcaggataccaatgccgacaccgtagacaatcataccgctcttgctcatcggcgaagtcacatagtcggtcgccatgaagatagctcccaacatcagacctccggacaacagatggacgaacgggcttgcgtattgaaccggattcaccaggtgcatgatacctgtaaagacaaataccgtgacgaagatggataccggaacgtgccaggtgatgatcttcttccataacatatagaacatacctaacagcagtgccagtgcgctgacttcaccaaggctaccgcccatgttaccgatcagcatgtcgctgagtgtaggcattttgtcgagtgcaccctcgttcatcagagagaggacggttgcccctgttgttgcatcggcataagatgtcaactgtccgacaacgggccaggtggtcatctgtgccgggaaagagatcagcaggaagatacggcctgtcagtgccgggttgaaaatattgttacctagaccgccaaacgacatcttaccgataccgatggctgccagtgcaccgatggcgatgatccagatcggtaggtttgacggcaggttgaacgccagcaaaacgccggtcaggatggccgaaccatcgtaaatggtcggttcctttttcatcaggaacttctgaatcagatattcgaacaggacacagaagaaaactgaggctacggttacgatcagagcacccagtccgaaaaagtagagtgataccaggaaagccggaacaagggcaatcagtacaccgtacatatttttgcttatgctgtcgccaccatgaatgtggggcgagggagacacgtataatttgttttccatattgctcttgttttatgactttcttgcacgaataatacccattactttgcctttgcccaaccggatctgatccaacagcgggcggtgggcagggcaagtataactgcatgaaccgcattcgatacagtcctggatgtagttggcttcggctttttcccaatccttatagatcgtgaatttcatcaggaaggccggattcaaccccatcgggcagacgttcacgcacttggcgcaacggatacagtcttgcatcggtttgcggatagattcttccttggtcaggagcaatacgccggaactacctttggttaccggaatttcagcgcttaccaacgctttacccatcatcggaccgccaccgataattttacccgtgttttcgggaagaccaccggctgcttcgatcagtgtgttgataggcgtacccatacgaaccaggaagttcgagggggtggctacggcctttcctgttacggtcacgacgcgttcgaacaacggtttgttcttctggacggcttcgtagacggcgtatgcggttcctacgttctgtacgacggctccggccgagatgggcagggcgccgctcttcacctgacgacggatcacggcgtcgatcaactgcttttcacccccttgcggatattgcaccttcagcggcatgatctcgattccgggataagcggctgccagcttcgtcaggtgggcgattgcgtcgggtttattgttttcgatgccgataacggctttgtttacgtttacggctttcatcagcaatgtgacgcctaccaatatctgttcgcctttctccatcatcagggaatggtcggaggtaagataaggttcacactcgacagcattgatgatgatgatctcggccttgcttccgggaggcggcatcagtttcacctgtgtcgggaaggtggctccccccagacctacgataccggctgctgcaatcttgtcgacgatttctttggatgacagcgtacaatcttttaccaatgcatcgctgcggtcgatcgtttcttcccattcgtctccttccacatcgatgtagatggcgggacgcttgtagccgcttgagtcgagggcgttatctattttgtttactttaccggataccgacgagtggatattagcggaaacgaaaccacctgccttggcgacaagtgttccgactttaaccagatcacccttcttgaccactgcctgggccggagccccgatgtgctgactgagcggtatgattacctgcttaggtgcagctaaagcggtaattttcttaccggcagacaatttattttcgggcggatgtatacctccgattcgaaatgtccttagcatactattagattttatttttgaattgtttcttcttttgtttcaattttaggagtttctgcatttggcgtagcgtttgctgttggagcttctgcctttggagactctttcttcggggcttcagtctttggcgcatcagccttcggagcggctggtttcggagctgttgccggttttattttgtcggcgtccacagccggagctgcctctttacgtggcgggaagtttaattcgtggatggcaccggtcggacatacggctacgcacttgcggcataagcgacattttgtgtaatcgatgtaggccacgttattttccactgtaattgcttcgaacggacattcctttgcacatttgccacagccgatacaagcgttggcacatgctttcttggctactccgcctttgtctttgtttacgcagctgacgaagatacggcgtgatttggggcccttcttacgcagttcgatgatgtttttcgggcaagcttttacgcaagctccgcatgaagtacatttgtcttcgtccacttccggaagccctgtcttaaggttgatgtggatggcgtcgaagttacatgcagccacacagtcgccataacctaagcaaccgaatgaacagccggtctctccgccgtacaaggtggaagcaatcgcacaactctgcacaccgtcgtattggttggtacgcggacgggcggcacacgttccgttgcagcggacaacggctaccatcggttctgcactggctgctttttttccgaggatggtggctactttgcccattacaggtgctccgcctacggggcataacaggccgtccaacgtgtcggcttttacacaagccgtagcaaaaccaccgcatccgggatatccacaacctccgcaattggctccaggcaatacctcctggacttgtgcgatacgaggatcttcgtatacttcaaacttcttggaggcggcgtatagaaaaactgcgccgatggctccaatcgctcctaatgaaataacggcaattaaaatcatgatatgtttgtcaattaagttttttcaaagtaaatatgaatcgctttttcagtttgtcgcgtaaaaagtataatatgcaataataaggaactaagagcagtaatccggttaacccgcttgtggtttcttcccattgcatacttgtacctgttacaatagccgcaaaaactatgatgagcggaaatacaaatgcaagaagtacggcctgcagccccagtgaactttgtccgcataactggacttcttcatttatatggaattttccagagttgtccggaacctcgatgatcttttctttgctctcggatgccgtacacatacttttcgcatggcatccggagcaagccgattgttggatgatcctgacatagaccgtaccgccgtcgatcttctctataatcccattgtgattgatactttcgctcatatttgtaatctcgacattgcaaaaccgaggcaaaagtacgtattatttggaaattatgtcacgattaacaaagtttattatggaaataatagactttgtcttaccatttgtaattaaacccgaagcttaacagctcgttgatctgaagatagctgtcgaaatcttcgtttttggcaacaccatcgtcatagcgaaggtgaagattgatccgggttgaaaagaaccggctgatctgcaagttgaacgtgttctcaaactctccggtaatacgatgataatccgtgaaataatagaaacgagatgtccaactgacatttcggttgatattgaatgtcatgtttgcttcgagtttcgaaccaatttgactttgggagttcctgtatttgttaacatcgtcaggaagttcggcggcattgtctttctctttaaaaccatgtcgtttcaaatccatatctgtccccttttgggtactgtacatatagttataagagaatggagccatgttgacattcaattttatgtttcggtgtctcacctttgtaagggttttggttagttcgtatttcataccgataccggtattgaaggtcataggcgcgagaaatgccgataatttggtttcgctgttttgggcgtagttggttactacttgtgtgttgaaactgatgtcgactgtgtagtaccacttgttaaatgctttgtaaccgaacagcgtatggagacgaagtatctggtcgtttatcttatacgaatgtatagagtctgttttgtccggcaaagtattcatgttcagtttgaattcaagttcgtttgttacctgtactttgtctttattgtaatcatatttgaaatattgccgggtattcatattgaagttcggatcgccacctgcactccagttcggtgaaatgtaattttgcgaaaactgcatggtgctttcgaagttggaagtccaataacggcgttccgggataaacttgaccggagcgtccacgtcgctgaaagcgttcgggtcgttttctattttgattagttcgggttcgtatgtcgctttcttgataacatgcgttttaacgacatctgtcggcaggtcacgttccgaataacggaaatattccggatagtttacacgtacataattatatgcggtattctgcaacttgttctttagtatttcgtcttggaacaaagtcgtatccggttcgaacaatgggaagttgggacgttgttttgcaataaagtccttgtcatacaattgcaggtcttccgggataagtcctcccttgaacaggatcggggtgaacagcggattgacgattgtagtatcccgtaaggttgcccacgggctgatgatggtagacgggtcgcgtacccaatttacccaatattgtgcttccggcgataattctatctcgtctttttttaaaaagcgaagcaagttctcactcggtgcggcgggtgatgagtagctgctattgagtttttcgaactgtgccctgaggtcggggattttatccagttccgtttcttccaagtctaataaaggaaatgtatcgggaacagcggtctgaaccggttgattcgactgattcccgctaattatgttgacatcctgtgctcctacctgattactactgaataacaatacaataaataacgctaaaacagacctctttatcatcgtcgtatctttttacattcatttaaaatattggtgcgaaattaatgaaaagttctgagatagactaatttattttcggcgttgtcgggaacatatccgtgcgtttttgtacgtaagatgtacgggaacggacaatacgtttaaaagcctggtgtgtatgtggttgtaaataagtgaattcctgatttggcatgatctttgccttatctttagtggttcataaaaaagatatgatatatgtttaaacactatgtaaaagtcgcactccggctaattaagcggagctttttgttttcgtctgttaatatgctaggttttgtgttgtggatgacggcagctttcctgatttatctctggattgtggatgagttgacattctagctttccggttatcgccggcgatcccgaccggaaacctggattccgtcaacggcaatgaagtgatgaacctgttgatggaactgaaccgtgaaggaatgaccgtcgtgatggttacccactccgaggaaaatgctcggatggcgggtaggctgatccgtatgatagatggcaatattttgacagaaagcagaaaatgaaaatccacttttgtgcttacccgaaaaagttgtacctttgttccctcgaaaatcaaacggaatatggatagaatccgattaaaagacaaagaatttgaactctttatcccggaagaggagataaaggatgcaattgcaaaagtcgcagaacgtatccgggaggatgtaaaaggcacgaatccgttgtttgtgggaatcctgaatggagcttttatgtttactgccgagttgatgcgtcagttgaacgaaccgtatgagatcacctttgctcgttattcttcttataaagggaccagtacgaccggtgtcgtgcgtgaaatcatgccggtgcaggccgatgtgaaagggcggactttgatcatgatagaggatattatagataccggatttacgatgcaatatgttatggataaactccgtaaggatggtgctgccgatgtcaaactggcgaccatgttgtttaagccggattcattgagatgcaatttgaaacccgattatatcggcattcggattccgagtgattttattgtcggttacggcctggattatgatgaaatggggcgggcttaccgaaatatatataagataattgacaattgataattatcaatatataaaggagtggagaatttatcagattaatgtataataagaggcgatggatggttggatagttggcaggtaattgtcaattgtcaattatcaattgtcaatttaaaaagtttactttttatgttgaacattgttatttttggtgctcccggttcaggaaagggaacacagagcgaattgattattaaagaatatggtttggatcatatctctacaggtgatgttttgcgttctgaaatgaagaacgagacagagctgggtaagattgctaaagattacattgaaaaaggacaactggttccggatgaactgatcgttgacatgctggctaaggttttggacagcaaggtgaactccaaaggcgtcatcttcgatggtttcccccgtactatcccgcaggctaaggcactgaaagaaatgttgaacaaacgtggaaccgatgtttccgttatgctgaaccttcaggtagaagaagaagaactgatcaaccgcctgttggaacgtggtaaggtttcaggccgttcggatgacaatctggaaacaatcaagtcaagattggacgtttatcacaaacagactgctcctttggcggattattatatcggtgaaggcaaacatgtcgccatcaaaggtatgggtacaatcgaagagattttcggtcgtatcaaggatgctgtaaataatttgtaatggatttatgaatgaggtttatgatttatgatttgtgatttatatcttttgtcgctatgaatcataaatcataaaacataaatcataaattaaaaattaaaagtggctgaatcaaactttgtagattatgtaaagatctattgccgttctggtaagggcgggagagggtcttctcactttcgccgcgagaaatacattccgaaaggaggtcccgacggaggcgatggaggacgaggaggccatgtgtatcttcgtggaaaccggaattattggacgcttctccatctgaagtatgaacgtcatattatggcgacgaatggtgaaggtggcggagccaaacgtagtttcgggaaagacggtgaggatcgtgtgatagaggttccttgcggaacagtcgtttatgatgccgaaacgggcgagtttatctgtgacgtgaccgaagacggtcagaaggtaatgctgttgaaaggtggacgcggaggattgggtaactgccacttcaagacgtcgaccaaccaggctccccgctatgcgcaacccggcgaaccggcacaggaacgtatggtgatcctgcaattgaagctgttggctgatgtcggtctggtcggtttcccgaatgccggaaagtcgacattgctgtctgtcgtttcagctgccaaaccgaagattgccaattatccgtttacgacgctcgaaccgaacttgggtatagtaagctatcgcgacaaccgttcattcgtcatggccgatatccctggcattatcgagggagccagtgaaggtaaaggtttggggttaaggttcctgcgtcatatcgaacgtaattcgttgcttttgtttatggttcctgccgatgcggatgatatcaagaaggaatacgaaatccttttaggcgaactggtcaagtataatccggatttgcaggataaaagtcgtgtcttggctatcaccaagagcgatatgctggatgaagagttgattgaggcattgtccgaagatctgccggaaggcgttccctatgtctttatctcctccgttaccggaatggggatcaccgagctgaaagacttgctgtggaaggaactgaacaaggaaacgttccacgaggtagagcgtattgtacataagaacatcgatgtaggcgcacttgcgcttgatgatgacgattttatcattcctcttgatgaagatgatcccgacgacgatgaagagtatgaagaatatgaagattgggacgacgaagaagatgaagatacttccaaatgctaaagtgaagatgttgcaatttcccgcattaagcgaggattgcaacatctctcattttgtgacaacccgtcagggaggtgtgagcaaaggtgcgtatgcttcctttaaccctggcgaatacagcggggacaatccggaagctgtccgagcgaaccggaaacttctttcggatgcaatcaggataccatccgaacgtatcttcgcgccttttcaggttcatggggcggaggtccgttcgatcgaaccttcttttctttcccttccattggaagaacagcagctttatatgcatggtgtagatgccttggtgacggatgtgccggaagtttgcatcgctgtctcgacagccgattgtgtccctgtcttgctgtatgctcccgatgtgaaggctgtagctgccgttcatgccggttggcggggaactgtattgcggattgccgggaaaactgttcgcatcctcatggatgaatatggagccgatcctcgtctcatgaaagccggcattgctccttccatcggtcccgaagccttcgaagttggcgaagaggtcgtcgacgcctttcgggaggccggttttgaaatgtcgtgtatcttgaagcgcgatgccgataccggaaaagcccatatcgatttgtgggaggccaaccgtctgcaattattgacagaaggcctttcggccggaaatatcgaactagccggaatctgtacctacgcccatcccgacgagtttttctccgcccgtcgtctgggaatcaaaagcgggcgtatcctgtccggtattttcttgcgtggttcctccctgtttatacaataaaggattactccaaaatggatgcttttcatcagattttagttgatcatcatatgtcatcataatgtcttttattggtttttatatagagtagaggtgataacacattttttatggaaaaatagatgtttcaggaggatatgcaaatagaaaaatagttttttgtaaagaattgtgtttatctttgtagtaaattgagcggtgtataatatatatggtccttttgcttattaaataaaaaagttatgagacgaacagatgtagtagaacaaatcaggaaggtcgtgcaagaagttacttaaatatgatatcctaacgcagactcataacggcgtaaaaagtatgcttggcttacattttgtatctacaggaaagttgccgattaaaataggtaagatatttggaacgttgtttgaaaagaagcatagtggagactatgatgattttgcgtactgcgacgaagaattagtgaatgagttatatcctcaaactgaaatatacattattacaattgaaaaattaatcctttctgactaaataggtttattttttgtggtttttataagtgaaattctatgacaaatatttcaatttcagaagaaatagccacggcctgtccggatttgcatgttttggttctgtcttgtgatgtttgcaattctgaaccggacgaaaggctttggcaggagatagcggacgaagaaaaggctgtccgggaaacagtcaagctggaacaaatcaacaaatggctccctatacaggctactcgccaggcttataagcgtttgggaaaagatccgaatcgttatcgtccttcttctgaagccttgcggaggcgcattctccgtgaattacccctttataaggtcgatacgctggtcgatctcatcaatttggtttctatccgtagcggatattccatcggaggcttcgatgcggataaaattgccggtggcagtctggtgttgggagtcggcagggaaggtgaaatttatcatggaatcgggcgtggagaattgaatattgcaggtctgcccgtttaccgggatgcagtcggtggggtaggaactccgacgagtgatgaggaacggacaaaaataggactggatacgactcacttgttaatgattataaatggttattcaggattggaggggttggaggcggcaggaaagtatgccgtgggcttattaagcaaatatgtttcagctataaacatggaggcggaacttgtcacagccaaagatcggacgaaaatagcgctataattctgttataatagtgttaattatgctttcaaaacataaaaagcacctgtctttatgctaaaaaacatctatatccttttgttttaatcgattaatctataaatttgctcccgttaacgattaacaaaacaaaaagaaacatgatcgaattgattggaacaaacgccggccttgtttggaacgcattgaatgaaggcggtaagatgagtgttaaggcagtaaagaaggctactaagattaaagcggaaaaagatatgtatgctgcttttggttggttagcgaaagaaggcaaattggctttcgaaaacatcgagggtgaattgtacgttgcgttagtataaatatagcgtagctgaatctattggaaggagggctgttcggattttagtttgaacggccttttgtgtgtccgaacgttttctgtcaaaaaaacaaaccgattcgttgttttattcaattctatcctttacttttgtgtagaatttggtgtgaaatgaccgaagatcataaaagattgttggctgtatttgatgttagggttcgtgatttgatggagttttgcgataggcaaaaggagaaaatcaacgagcttgaaagttctttagcacagaaagaaggagaacttcagcaggcaatgaagacgatcgaagagttgaatgccaaatgcgataacatgctgactgcacgggttgtttctgtcaacgagggagaaatgaaaagtgccaggatgaggttatcgaagttagtgcgggaagtagacaagtgcattgcactattaaacgaatagaggcgatggacgataaatttcttatacatgtagagatagccggtaaaagttatggtatcaggatcaaccggagcgaggagcaggtagcccgtgaggcagtccggcaaatcaggaagaaaatggaccagtaccggaagaaatattccgacgtggatgtaaaagatttgttagccatggtaacctttcagctatcggtggaaaacttgaagttggaggataagaatgacacaagtccctttactgaaaagatacaggagctgaccgatgaactggaaagtttcctgaaggataaatagttgtaagaataaagaagatgcgtttccgcactactttgcatgggtgtatccatgtaaggcagtgctttttttgtataataatataactgaatttaaactataagtaaaatgggtatgactataatcatagcacttgtgaccttcgttgtcggaggcttgctcgtgtggtttgtgatgagagtccttatgaagtcaaggtatgacgctgtgatacgcgaggctgaaaaggagtcggaagtaatgaagcagaagaagctgctcgaagtaaaagagaagttccttcatttgaaagcggacctggagaaacaggtgtccgcccgtaattcaaagatacagtctgtagaggctaagttgaaacaacgtgagttgaatttgaaccaacgtcaggaagacctgcaacgcaagaatagcgaagtggatgccgtgaaggagaatctggcggcccaactggaactggtagataagaagaagcaggatttggagaaacttcaccagcgtgaaatcgaacatctggaaactctgtccgggctttctgccgaagaggcgaaggagcgtctgatcgaatccttgaaagacgaagccaagtcagaagctacttcctacatcaatgaaatcatggaagaggcaaagatgacagccaacaaggaagcgaagaaaatcgttatccagtccatccagcgtgtagcaaccgaaacggcaatcgagaattcgattacagtcttccatatcgaatcagacgagatcaaaggccgtatcatcggtcgtgaagggcgtaacattcgggcgttggaagcagcaaccggtattgagatcgtggttgacgatacgcctgaagcaatcgtgttgtccggttttgatccggtccgtcgtgaaatagcccgtctggctttgcaccagttggtacaggacggacgtatccacccggcacgtatcgaggaagtggtaacgaaagtgagaaagcaagttgaagacgaagtggtggaaaccggtaagcgtaccgttatcgatctcggtgtacatggtttgcatcctgaactgatccgtatgatcggtaagatgaaatatcgttcttcttatggccagaacctgttgcagcacgcacgcgaaacggcgaacttatgtgctgtgatggcatctgaactggggttgaacccgaaaaaggcaaaacgtgccggactgttgcacgatataggaaaagtgcctgatgacgaaccggaattgccgcacgcaatcttaggcatgaagctttgcgagaaatataaagagaaacctgatatctgcaatgccgtaggcgctcaccatgacgaagtggaaatgcaaacgctgcttgctccgatcgtacaggtttgtgatgctatttcgggtgcgcgtccgggagctcgccgtgagatcgtcgaggcttacatcaagcgtctgaatgatctggaacagttggctctttcttatccgggtgtagtgaagacatacgctatccaggctggtcgtgagctccgcgtaattgtcggggctgacaagatcgatgataaggataccgaaaacctgtcaaccgaaattgcaaagaggatccaggacgaaatgacctatccgggtcaggtgaagatcacggtgatccgtgagactcgtgcggtaagctatgctaagtagatcgatcatcattgaataagtttatggaaggccgggctgaataaagtccggctttttttatttttccgccaataatcagggggaggcttcacctttgtatgcactggttgggttataagattgttgatgggtgaatgcaaatagtaaaagtgccttcacctgttacggttgtcttcatctgcgggttagtcgggtatggaaggtacactatagagtggcagtcgctatacttttattgttaaactataaaaccatagagcttttggcctaagtcgaaaaccttttcgcccttggtgaaaaaggcttttgacaatgggcaaaaaggctttcgacttaggtcgaaaatgaaaagagatataaggtaaatattaaatgttagtatattaggatattaatatcattcacaatctctttattattcgcttaaatatgtcgctttgtataagaggccggatctggtgtgtctgggcgagacaaggtgaaagtaaatttttaaggtgaaggcaagcgtcaggactgccttcaccctctcatatgataatagtcaaagggtttcagggaatggtgaagcccaatcggatgcttgcaaaaaaagcggttgccgatctctggcaaccgcttttttagtttgttatgtgaaaccggattgcttatttatagctgtagcccgctttcttctgtgcgctgttggctttggctccggggatcaaagtgaagccccatttgtattcccggtctgccggtaaagtatattccggttccggacgtgaataccaactgtcgtagccggccaatccttgctgtttcaggtctacgcatacttcaacgaagttacgcggcgcgatgtcgttgatatgcgtctggcgaggtttgtcatacggtccgatttccggacggttggcaatctcttccggtgtgaagttgttccactggtacgggcggtcggttgccttgccagcgtcgaagtcttcgacggagttacgcattgcgttgaattccatctcgtcgtctgcaacgatcaacaggttcttgcctttaccgcctaatgaaatccagcgggtatcgcagtggtggccgttttcctgcggacggacgtatgggaaatactgttcttcagccgtgctcttgtactgtccgatcatgtaaccggctttgcggtcccaatagttttccagcggaccgcggccgaagtattccagttggtccatcgttgccggcagacggaaacgtacgccgatacgcggaacgaccatcttgtcgcgttcgctgacattggcgcggcccggtgagaaggtcgcggtggcggtcgcttcggaaataccgatcttcacaccgtccaaatgggcaggcgtgaagtgggtggccacgttcatgataccgtcaggatagatcttgtatgtcaccaggaactggttgccggccggcagtttatagtcgacttttacgatggcattaccatcgatgatctcgcctgtcgcgcttgtcacattgaagttacggcttgagagttcccatatctcaagacgtttcgggttgccgcttccgtagtcgttatcgttcggggcgcgccagaagttcggctggataccgaagccttcgttgaagtattccgtgccgcctactttataggaagccacgacgccggctttcttgtcgaatacgaagttcactttggaagaagtcaccttcaggtcgtttccttcttcagatacggtcagcttggggcctgcggccttgtaaacggtcttgtcggctgttaccggcaaaacaaactgatcctgtgcgatgtcgtatccggcagggatcacgccatcctgtttggtcgtagtcacgacaaagttcaccaaataatcgacgccggcctgcggtttcaagccttctaccgggactgtgatttcctgggatgcctgtggcgccaggtcgagagacatcttgttgcctttgatgattttgttgtttgccttgatcgtatagctgatcatgtaatctttcaggctcgtgaaatagaaacggtttgtcactttgaatatgcctttcgccacatctacagcttcgaaaccgacattctggtgtgcatatttcacttcttccatagccggatgcggagtgcggtccgggctcacgataccgttgcaaaggaaattgccgtcactcggcatgtctttgccgaagtcgccgccgtaagcataatattcttttccgtttgcatccttggcaagcagaccttggtcaacccagtcccaaatgtagccgccctggaggttcgggtatttgtagatcgctttccactggtcccaaaggttaccggtcgagttacccatcgcgtgggcatattcggacggtgcaaccggacggtcgctaccttccttacctatctcttccaaccattttgcacttggatactgcgggacatacatgtcggagttccattcccactgtgcacgttcgtagttgaccggacggcccatcatggtcttttccttgtcctttacatataaataggtctggtagaagttgtaaccgtttccggcttcgttacctaatgaccagatcgttacggacggatgatttttgttgcgttcgtacatgttgactgtacggtccatatgtggtttcagccattccgggttgtttcccaacgtaccgcctttgcgcaggttgtagtacatgccgtgcgattcgatattggcttcgtcgtaaacatacaatccgtattcgtcacaaagctcgtagaacctgcggtcttgcgggtaatggcacaggcggacggagttcagattgttccgtttcatcagttcgaaatccttgcgcatcagttcttctgtcacgtaatgtccggtctgcgagttgtgttcgtggatattgacacctttgaacttgatcggctgtccgttgaacagcaggacggtgtatggtttgccgttgccggcgatctggtcgatctctttgatttcgatgcggcggaaaccgacgttttgcgggatcacttccgtcaccttgccatcttccttgatcgtcatcaacagcttgtaaaggttcggatgttccgcgttccacgtttccacattatccagtgtcttttcgaacgaagtcgttgtaatcgtgttcgggcttacccacaacttgttttctgccgtagcagccacattgccttttgcatctaataattcgtatgtcacgtcgatgttcttgaccttgtcagaatggttcttgatgtctattgccaagctgaagataccgtttttgtaagtgtcgtcgagcgtggagacaatacggtaatcattgacagcgatcttgggttgtgaccatagatagacatcgcgttcgataccgcttaggcgccagaagtcctggcattccagataggaacctgtgctccagcggaagattttcagcgtcagcacgtttttgcctggttgcaggtatttgttgatcaggaattcggccggattcttggaatcttcgctgtagccgacttccttgccgtttacgtaaacatataagcccgatttggctccggcgatgtgtagatatatgtcacgtccgtcccaaccggcaggaacctcgaagtcgcgccggtaaacacctaccgggtttgcttccggcaacagtggaggttgcgggttacgtggtttgaactcatatccgtgattcgtgtagatggcagtaccgtgtccctgtacctcccagtttcccggaacggtgatgtcgtcccaatcggaagtgctgacagaaggatctgtgatgttggcaggaaggtctttgtatgaatctacgaaatagaatttccatgtgccgttcagcaatgagtagaaaggacttttttcatatcgggaagatagagctgtggcacggtcttcataactcatgaaagaggagcggggagcctctttattaacggcaacgacttggatgtcctgccagtaaggcttcgcaggctggttcgtcgcatcgtcagccaatgcagtccccagaaggaagcaactcaatgctcctgtgagcatcgtttttttgatcatgtgtttcatatgcatttttaatttagattagacttagtctgttgaaaagtgaaagttgaaagtgaaagagagtatatctttgactttcatctttcaactttcaacttttttatcttgctgcgtagaaagaataaccttcggctacctgtttgaaagcaagtacgcctgcctggttcagttctacattcatttctttgccgtcgggaaggtacatgacaacttcgtcgtcacctgtgaacttcagcagtttggtcgattcgccgtttgcttctacgctccaactcttgtctgcttcattgaaaaccagatcgaccgctttttcttctccttctttctggatgtggtagccgtctttttgggtttcgatggcatacgtgccgtctttggtttcgattgtttttaccgtaccggcatctgcaacagggttgcttccgctccagaattcaatcgagtttaaaaccaatatgtcggctaatgcagagatttcataaaccggaacaatccagaatgcaacgaatactaactcgtttacaaacttgctgtcgatatttctgttccaatccaacagcttatttgacaacccaaatgatccaatgcatgatgagaataatacactgctggcaagcgttgctgccactaataaagttagactttttttcttcatgaatatttagtatttgtagttaatttggggacgaagataacaatttatacgataattgtcattaataacaggactataattatttattggttactctttatgaatttctttttgaacttgaaactttttatgaaacaaagaggcttctaaaattcatttaaatgattttagaagcctctttttattttaatagagagtatcggttgttagtaacctggattctgatctgttgccagtagagggttcaagtcgattgctgtttggggaataggtctcagcgacatccggctatcccatttcatcgtgatgactttttcgccatccggtgtggagataggaacattgttcatctgcgcactccaataagcatcgccataacggcttaggtcgtcgctgcgcaaaccttcaccagccagttcgatgcgacgttcgtttttgatcaaagccaatccatcttccttgccgaggcttgtcggtacgtttggcataccgcaacgatcacgaagctgattcaaggcagcctgtgtctgtccgtcgaaacctgttgtctgggtatgagcttcagcaaagatcagcagtacttcggcataacggatacagggataatcgccggttgcttgtccgtcattattcgcatcattttccaacggtgacattttgcggaagttgaaaccagtcttggattcattattcccgtttttgatccattcatagatgaagtttgtaccgtagtttgtctcataccaacctttgaaggggaataggatggaggcatataaacggctatcacgattgcggaattcctgcatgtactcgtaatctttcagttttccactgttgataaggccggatgcaaaagaaataaatttggcttctcctgcaggagctttatattcgtccaaatcccctttgataactttataagcattcatacgcttttcgatactgggaatggacggtgttttgccgtctactgtccagtaagcgtcgaccagattttgtgtcggagtcacagaagaccaacctcctaattgattcggacggatgcttgtgtatcgtgtcatatcttggtagtcccaactggaagcggtatattgacgagtcattacatattccggattgtctgggttcccgttttccgtatgccataaagattcgtagctgaacatgcctttcataaatttgtcacggtcgataccgtatttgtcaaaatctatgtataattccatttcttcagcttctttcttttgtgcttcggtcaattcactgacttggaataatgaaaaacctcctttatccatgatttctttggctgctgcttctgctgtcggatagtcgccgaaataaagggctgctcttgcttttacggctaaagctgcatatttggtcatacgtcctttttcgttcggataactacctgcatatttttccggaaggatagctgctgcttcagttagttcgttgagaataaattcacggattttgcttgtttcgtcgcgaggaatgttgggagcatcgtatgacaatacatcggtgatcaaaggaactttaccaaatgttgttgtcaagttcagataagtccatgcacgcatagctcggacttccgctttgaaccgtgttttcagatcttcatccatcggaacattctctatttcctgcaagaaaatgttttgtttgcggactgtttcgaagttatagccttcgtcatatagggcactgagaccgttttgctgataaatagctccgttcgattcccatgagtattggcagtatgcatcgttcgtatacgaatcgctgtgaacagctgcgccgggaatgcttgctgagtaaacagcgttcagattataccatgcatctttttctgatgtccagaatgtttctgttgcaatgctggaagtcggttcgacatccaggtcacaactgcaaactgttgttcccagagctaggcagaagaacgtatgtttgaatatattattaactgttttcattttgctttttgttagaatgttaagtttacaccaagtgaaatagaagaagttccgcgggtgtctgttccacgtccggacggtgtttccggatcaaagtcttccatgcggtgatctgcacggattgtaaatggattttcagccgatacgtaaagtttcaaagcatcgacacctaaatgctgaatttggtgtttattgaaattatatccgaatgtgatatttttgatacggaaataatcagaatcgaacaaccagaaatcggagaacttattgttgaaagtagagtgtgcacttgtacgcggatagatacgaggataagctgcatttgggtcggggttatcaacggtccagcgtttcaggtgaaattcacgtggactggcattatcagagaaagcccaagcctgttcctgatagaaacgaaccattgttccagtcacaccttgtccgaacatacttaattcgaaacctttgtaacgtaagtttagattaacgccgtatgtaatatcgggaacgtcacaagccagatagtctctgtccttatcggtcagttttccgtcgccatccaagtctacatatttaatgtctccggcctgcggggtaatgccgtctgttatgtagttgccattgtcgatgtcttcctgtgtcaataaaccgtctgagcggaaaccgtagaatgtgccgatagcataacccactttcttaatccaagggtcttcgatcatcggatcgtttgctcctaaatcttttaccttattccagtttttagacagattaaaaccaaccgtataagagaaatctccaatggatttgttgtgagatatgttgaattccagacctttgttacttactttaccgatattttgcgaaaccttatagtcactattgataccgacttctgctggactcggataagatagtaggatatctttggtttgtttgtcgtagaattcaccagtgaaactgaaaagtccgtttagaatatcgaaatcgaccccgacattggtaatcgttacggtttcccaacctaatccaggattagctggctttccttctcgaataccgctgacgatcgtattttcgaagttataatttccaccctgtacataggtcgaaaaataatcatattgtcctacgttattgatattacctaactgtccccaggaagcacgcaatttcaaattatcgatccaactggcatcttgcatgaaactttcctggttaatacgccatccggcagagaacgaaggaaagaaaccccagcggttgtctttgtggaaacgggaagaagcatctgcgcgaaagttggcttccaacagatacctgtctttgtacgagtagttcaaacgggcaaagtaagacattaatttatcttcgtaaacatcaccttccgtgctcatgtcgctgggggcgctcgaacctccattaatacccgtcataccgttggttgggaaattgcggcgccatgatttttgttgttggtatttgtaatgttcgtatgagacacctcctaatgcacttatattatggttttcgttgctccaattataattggccaaaccattgtaggttaaacgactattttcgttccagtcatatgtcatcttggaagcggtcacatccgtaccgttcaattctgagccggttacgaaatctttgattttatttctattggcttcgtatgttttacctttatagtcatatgccttatagatcatttgtccggtcagtgtcaatcctttaactggtttaatatcgagggcgaggtcgatcaatgtattttgtgatttgttgttgttccatcccccttcttccaagcgacgtagtggattacgttgcatatttaccagcgctgcaggatttcccccttcgtaactaccccattctccattgctttgacgagctacatatgtagacggaacggttagaagttctgtatatccaatacctccgctttctgtattgtttgtgttttggatatatttgaagtttgaacgccaagacaaccatgaggttatatcggatgagaggttggtggtcatattatatcggttggcggaagctccgggggtaaatttgtcatcatacatataccctaatgaggtgaaatatttgactttgtttcctccgcttacgctaacggaatgctttgtcatgactgctaaatcgtccagcactaaatcataccagtttgtattcggatacatatctgggttacttccgttacggaacatttcgatctcttcatccgaatatggcatctctgcattcggattttcattgaatgccgcttcattgctcaaacgagcataccattccgaacttagaacttttggagtgtatgttgcgatcttcatggatactgttccatcataggtcacttttacatcaccttccttaccgtctttggtcttgactaagacaacaccgtaagcagcacgagaaccataaattgcagaagaagcggcatccttcagaaaagaaacgctttcgatggaattcgggtccaaattggagaagaatgtagcatctgctattgctccgtcaatgacaaacaaaggggaagaagtccccaagtttccgcgaccacgcatgttgatggagatggaaccttgacggttgataatggttacccccggtacctgtccttgaacggaagccaacacgtccgtattgacacgctctttcagctcttcggagccgacagatgcaacggcaccggtgaggtttactttcttttgggtaccatagccgatcacgactacttcatccaatttttgggtgtcttctttcagactgactttgatcgtttgttctccattgtatttgatctcttgggtcaaataaccaataaatgagataacgattacatctcccttttttacttccaggacaaaattaccgttcatgtcggtaacagtaccgtttgtagtgccttttacaactaccgaagctcctgctacagggccgaactcgtcttcaacgacacctttcaaacttgcttgctgctgagaaatgccaactttgggagtcgtagtttcgttggcggcaaatatcacccctgatgaacaaagggctacagacaacagcaaaaaactgactggtcttgcgattttcaacatactaattgttttttgtttaataatagttagatataataggctttaagaggatctgttttcttctacagctcacacttacttgcttattttagtaattagggtcaaagtttatgcttgcacatgtgtagttcttgtaggactatgattaagttatacgaatttatactgaaacatcagaattaccagtcttgcatgtttttttagaaaaaattagcaagaatactattgaatatattttaataccgtttttatacattgagacaaatatattaaaatattttactaatacaaatgatattaatcattattttcttttaccacctctattctttaccctaaatcccttgaaaattcgacaatatggttgtattgtgcaagatgcatgaatccatagtttgtttcatatatatcccgaagctctcaggaatttcaaccaagtacacatcttaaaatgttaattaacaattaagcgtttccgagtgttattttctaaacctatcagattttcttgcttttttctatatacttattgtatagatctaaatttatatggatacatttaatcaataatttaatttgctatgtaatcctgcttcccgctatatatattactttggttataaataactgataaatagcatgatgggataaatatttccacatattaaagtaatctgtctaaaagaaaataagattgtatactttgttgataatcatagaccacataacttactaacatcaacagattaattactaggaaaatctggtttactcccaaggttttctaaaaaaacagactggtaattctgatgtttcagtataaattcgtataacttaatcatagtcctacaagaacttcatacaaaaaatcctcatttttgcctatacagctttatatttcttacaataagtcatagtcctacaagaactatgttctcatttgcatggcaaatgtatgacagatgttaggaatcataccatgaatgtaaagaatctataagtaaggtggttatcacctccttggatcttattcatatagtgactattattattaaacaaaaaacaattagtatgttgaaaattgcaagaccagtcagctttttgctgttgtctgctgctttatgttcctcaggaacagtgttcgcagctaatgagacagcaactcctaaagttggtatttctcagcaacagaaaagtttgaaaggaacagttaatgatgtactgggccccgtagcaggtgcttcagttgtcgtaaaaggtacgacgaacggtacggttactgacatggacggtaactttgttttggaagtgaataacggtgatgttcttcaaatctctttcatcggttatgtaacacaggaaatcaagtacaccgggcaagcgactttgactgtgaatctggtggaagatactcagaaactggaagaagtcgtagttgtcggttacggtacacaaaagaaggtgaacatgaccggggctgttgcacaaattgacagcaaagcgttagaaaatcgcccggttcagaacgtttctaccgcattgcaaggtactatgccgggtgttcaggttacttccggcggtggccgtcccggacaggatggtggtacgattcgcgtgcgtggtgttggtacattaaacacggctgatccttatattttggtggatggtatcgaaaccggaacgatgaactcggtcgatccgaacgatatcgaaagtatttccgtattgaaagatgctgcttctgctgcgatctacggttcgaaggcgtcaaatggtgtaatcttgattacgacaaaacgtggtaagacaggtaaaccacgtatctcttataatggatatgtaggtttccagaaaccgacggaaatgattgaccgtatcagctcttatgactatgcgcgcttgtatagccagtctatgatcgatgaaggtttgaatccccgtttcaatgaaactgatattgagaatttcagaaatggtacttctcctaacacggattggtatgatgaagcctatagaaccggtgtacagcattctcataatgtaagtgtgagcggtggtacggaaaatgcgaagtatatgggatctgtcggctatttgggacagaccggtattttaccgaatgcggacagacagcaatttaatgctcgtacaaatttggatctgaagctgaattctagattgacggttcgtttgaatttggcatatatcaagaatgactattccgacccaatttcttcttatgcatctggtataagtgaaactggtgatccgaatagtgctgccagctctgatcagattatccgtcagttgaaccgtattgctccgtggattgtaggtcgtgctgaagacggtacttatggtactattggagatggtaacccacttgcgtggttggatgttaaccaaactgttgaccgtaaaaatcagaatttctctggtaccctgtctgccgattataaaatcatcgacggtttagttgcaacagtgacgggttcttatgttaacaatcaacaacactatcgtgcatttcaaaaatatattcagtacaatccgaataaggaaacagaaccgaatcgtttggaagaacgttttaccggttggcatcgtgcaaactttgatgcattgttgaattttgacagacaattcggtgaacacggtttgaaagcaatggcaggttggcatacggaaaagtatgactacacctataaccagcagttccgtaagaatttcccgactaatgatctgaccgatatcgcggctggagatgctgctactcagaagaacaatggctatacacgtgagttggcgatgatttcttggttcggacgtatcaactatgattatgccggtaaatatttgttggaaggtaatatccgttctgatgcttcttcccgttttgctgatggtaaccgttggggatatttcccttctttctctgctgcatggcgtattagtgaagaaggtttcatggaaaatacgaaagattggttgaacaacttgaagattcgcggatcatgggggttattgggtaatcaagatgcattgacagattattatccttggatgaatacctataatctagatgcaagttatccgttaggaggtgctttgcagtcggggtattatcagaaagcatataagttgtcttctatctcttgggaaaaatctcgtacatggggacttggttttgatgcgacagtcaataacaagatcaatgtgacatttgactactatgaccgtaggacaacaggtattatcatggatgttccggttccggcagaatttggtttggatgcttataaagataatgtaggtgaaatgtccaatcgaggtgttgaagtgattctgagctacaacaacaaatggggtgattggtcgtttggtgcaaccggaaacttctcgtacaacaaaaacgaattattggatttaggtttgagtccggatgccggaggtgtaacggctgatccgaacaatggcaataaggttcgtaagattggtgaagcgctgaacacatatcgtgtttataaagcagatggtttctttgaatcggatgaagcagctcaggcttggatggataaatattccacacaggcaggttatccgtttggaactaaaaagttcaaggggggtgatctgatctatcaggatgcaaacggtgatggtaaaatgacggctgatgaccgcgtccttgcaggttcttcagatcctaaatttacgtttggtttgaatctgaatgctgcttataaaggcttcgacttatccatgttgtttacgggcgcggctggcgtgcatcgtttgatcaaccaggaagtaacaggctatttcggtggcgatgactcacatccggcaactgtatggttggatgcttggacaccggaaaacaaagatgcaacgatgccacgtgtggcttatgatgtaacatctccgagtctgtcatctaatgtcgtgtctacattctggttgcagaattccagctatttgcgtatgaagaacctgcaattcggttatacacttccgaagaatgtgatcaaatcggttggaattgaaaacgtacgtttctactactctgtagaaaacctgtttactatccataatatgcttgtcaatgtggatcctgaaatcggagatgaacgcggttccagtttcccgttaactcagacacatgcttttggtgtgaatgtgacattctgataagaacgattgtttaagattaaaattaaagaataaaatatgaaacgtgtattagtatatatgctggccgggatggcattggtcgggacttcctgttcggactttttggatacgattccccatgacgcactgtctcccagcacaacttggcaaacagaaaaggatgctgaaaagtttttgattggttgttatgacggttgggctgatgaaactggtattctgtattgggattgtgcttccgatttcggtttcaatttccatgtccatgaaaattatcggaatatcggaaatggtagtatgactgccagcaacgcagttgcagattattataaatttggaatgatccgtcgttgtaacgatttcttgaccaatatccaaaatattgaatttgcggatgcaaagaagaaagacaatatgattggtcaggtgaaaacgatccgggcttatacttatttcaatatgaactggcagtatggcggtgtacctattatcgattcttatgaaacagctgaagaagcacaagttccccgcaatacggaagaagaggtgaaaaagtatatctacgacgagttggatgctgctatcccgatgttagatgatgctcctgccgcaagtggttatattgccaaaggtacggctttggctatcaagatgcgttcagccctttattatgccgactatcagcgtgcgaaagaggctgcaaaagctattatggatttaggacagtatgaactggatccgagctttgaaaatatatttatggtgagcggacagaattcgaaagaaatcatagctgctgtgcaacatgatgaaaatctgtattcaaattggatgatcgccacgatgtataacaattcggatgcaggttggtcttctatggttccatccaaaaatctgattgatgcgtatgaaatgagtaatggtttgacaaaagaagaggctggtagtggttacgatcctgttcatccttttgcaaatcgtgacccgcgtatggcaatgacggttctttatccgggtatggattgggttaattataagggagaagaaacgatcattaacacattggataaggaggtgaatggtaaaacgaatccggatcatccgggtacggccaacaactcttcgaagacgggtttgacttgggctaaatatttggctccgatgtctcaatatggagatgtttggtcttcgaatgcgcagacgatcattttccggtatgcagaagtattattgacatatgtggaagctgagaacgaattgaacggcccgtctgctgaaatatacgatatgttggatcagattcgtacgcgtgtaggtatgccgaaagtagatcagagtaaatatggtactaaagaaacattgcgtgaattgattcgtcgcgaacgttctatcgagttagctggtgaaggccttcgtcgtgccgatattcttcgttggaaagatgcaagtggcaagatggttgctgaaacggtattgaatgctcctttggaaagcttcaccggaacgatcaattatgatgaaaaagatccgtacaaacgtgcagtcataagtggtgtcgaattagttgaaaaccgttcgttcgctcctcataaccggtatttaccgatcaagcaggatgcacttgataaaaacaagcaattgaaacagaatgacggttattaataagaactgatatatttatcatgttttaagagggatatattggatcatttccaatatatccctttcctttgtacagaaaaacactaacatagcatgaagcattatcgaattttctcttttatcttgttgttcatttgtgctgcattcggacaaagttgcagtatctcctcttccggccgggaagtcctggacatgaataccgactgggctttttatcggggggatgtggtggaagggagccggacggatctggatgattcaggatggatacctgtcgcactaccccatatcatgcaactggaaatgaaacattgcggcgggaactccatttatgacgggatcggttggtatcgccgttatttcaaactgcctgcgaagtataaggataaacggattgtcgtctcttttgaaggagtgatgacgaattgcgatgtttatctgaacggccaaaaagtgacggagcatcatggtggttatatgggatttgtcgcagaccttacggaccgtatcgattggaacggtaataatgtgctggctgtccgggtctctgccgagccagacccgctgacacctccgggaaagccgcaggacaaaatggatttctattattatagtgggatttatcgggatgtccggatggtgattacggacaaagtatatatcaccgacccgttgcaggaagatattgttgccggtggaggtcagtttgtgacgtatcccgaagtgacaaaagacaaggcgagggcacatcttgcgactcatgtccggaatttgacggataaagatcagacattgtctgttttctcgcaactggtcgattcggctggccacgttattgctgaggctgaaacaccggtcaccttgcacaagcaatcggacagaacggtggagcaggacctctttgttaaccagcctgctttatggcatccttatacgcctaatctctataccttgcgtacgcaattattatcggaagataaagtgctcgacgaaaccacccggaaaatcggtattcgtacgatccggtacacggccgaggaaggattctttatcaatggtgaaaaactgtatatgcgcggagccaaccgtcaccaggcttttgccaatgttggggatgcggcttccaactcaatgcaggtacgggatgtgatcgacctgaaacggggtggttataatgcggttcgcgccgcccattatccgaatgatccggctttcttggaggcgtgtgaccggtatgggctgttagtggtggagtgtattcccggatggcagttctataatccggattcaatctttattgaacgtttgtatgaaatcggacgccagatgatccgccgtgaccggaatcatccttctgtcgtcctttgggaaacggctttgaacgaatcccgttatccggtctctttggcaaaagagattttcgaactgtctcatgccgaatatccgggcgatcagatgtacacggcaggtgattacttcgggcatgcggaaatggagccctattatgatgtcttttataaacaggtttccaaattcccgaaagacggggatgtgatgagtaattatccggaagattttatagtagtcaagccgttgtttacccgcgaatggggagatggcgtgggcgaaaagccacgtgtcaacttgaaagaaagcgaggaagaacagatgcgccagtgccgcagccgtatcgagcagttgaatggtaaaggctattttgactggtgcatgctggatgccaatccacatatgggtggacatttcgtttggagctacaatgactatgcacggggcagccaggatgaaacgatgtatagcggtgtggtggatatcaaccggtatccgaaattcagctacttcatgttgcagagtatgagggacaaagcagtttcacaacccggattgtatgaagggccgatggtctttatcgcttcctataatgcttcgggagatttcgcctcgtctacaacagatataacggttttttccaactgcgacgaagtccgtctttatcgtaatgagaagttgatcggaactcagacacgggaagaacggacacctctgtttcgttcgattgtcgagaaaggcggcagtccggtgttcgtctttaatgccggggaatatgaaactggaacgttaaaggcggaagcgctggttgacggaaagattgtggcaacccacagtgtgagcactccgggaaaagccgatcgtctggttgtggacattaagacggatggcattgttcctgttgccgacggctcggatatgattcctgtctactttaaggtctgtgacaagaacggttctttgatctacaactctggacaggaaatccggattctggtgtctggtgaaggagtgctggtcggagatacgatcagccgtatcggtatcaatcctcagaaggtggaaggtggcgttggtttcgcatttgtccgcacgacgaagaaagccggtaagattacggtgaaagcgacagcagagggtttgttcgccggtgaagaggaaatcagcacgaagccgtttgaagggaagtctctgcctgatggaaaacatgctctgtttacggggaaagaggaagacaatgttgtggtaaaaccttcttcctggcagaagcgtatcttggagaaacctcgcctgaaaatcgcgtcggttcaggttggaagcagccaggacgggtatcctgcttccaatataatcgacaatgacgatcatacttggtggattgccggagaagaccggttgccacaggtagtcactttggtgctggaccgtccgacatacgtggctgccagccgtatccttttccagaaagacagttcttcctataagcataaggtagagacttctgaggatggcgaacggtgggaactcttgtatgagcgtgaatgtacgggctgggaatttaagccgatgacggttgaccgggaagtgaaatatctccgcttgacaatcgagaatgtttccgaagggcgtgccggcctgggggaaatctcgctctattaatatattatataacgtataacacgtctaatctgaatagcatgaaaagaatagtatatatgttggcagtcctgttctacgggacaagcctttttgcacaagacaagccgttcgacattgagcatgcgccggctcctttgttccgttgtcctatctatgacggccctaccgacccgacgctcgaatggaacgcggagcggcaggaatggtggatgttctacacgcaacgccgtgccaatgtccctaacttgcaggaagtggcctgtgtatatggcagtaaagtcgggatcgcggcaaccaagaacaacggtaaaaactggtattatgtcgggacagcgaacctgccggaacccatgcaaggacagagcactttctgggctcccgatgtgttcaagcataaggacacttattacatgatcgtgacctttatccccggtattcatcctttctggggaggtgatgcccggcttgtcttttacaaaagcaaggatctgatgaactgggatctggtggaggaaatagaaggtacacatggttgtatcgacgcttcggcgtttcagatgccggacggaacatggaagatgtggtacaagactcccgattccaagacgaatacgggtgtgagcaaggatttgacgacttggaaggtaaccggcaaatgtgagattgacgatgtcccgcatgaggggccgatcgtcttttattggaaaaataaatactggaacatcatcgacgaatgtaatctgggatatgtcggcttgcactgttacgaatcggacgatgcgactaactggacctataattcgacaatcctgaacaaaccgggcctccgtccggacgatttcgaccagggaaggcattgcgatgtcgttgtgatcggagaccgtgcttttattttctatttcactcatccgggacggacgtataaaatggacggtatggaagtggaagaaaatacttggaactatcatcgtgcctctatccagatagccgaattggaatatgtggatggaaagattgtttgcgaccgggataagtatgcaaagaaagtcccgtcacctatcgagcggaagaagaagtaaacgggaataaaaagaggtataaaatgaaaatagatcgtttgtttgttgtttctttaggggcaatcaccggattggcttcttgctcgtccggccaggaggaagaggcgcaaagaccgaatatcctgatcctgctcgcggatgatgccggatatgcggattttggatttatgggggcgacggatatccagacacctaacatcgaccgcctggcagccgaagggtgtatctttacggatgcccatgtggcggcgacggtgagcagcccttcgcgatccatgatgctgacgggccgctacggacaacgctacggatatgaatgtaaccaggataagctgggagatggccttcctgacgatgaagaattgcttccggctttgttgaaacggtatgactaccgtacgggctgtatcggaaaatggcatttgggctccgaaccctcccagcgtccgaatgcgaaaggcttcgatacgttctacgggcttttggccggccatcgttcttatttctatgatcctgaaaccagtgataaggatggcaacctgcaacaataccagtacaacgggcggaaactgtctttcgatggttacttcaccgatgaactggcttctaaggcacagcagtttgttacggagagcgagcagccctttatgctgtatatgtcctttaccgctccccattctcccaatgaagcgacggaagaagatttggcgcgtttcgaaggacagcctcgccagaagtatgcggctatgatgtatgcgctggatcgtggtgtcggcaagattgtggacgaactgaaagcggcgggcaagttcgacaatacgattatattctttttgagcgacaatggcggttccacgaccaaccagtcctccaaccttccgctgaaagggttcaagggaaataagttcgaaggcggacaacgggttccgttctttgtcgtttggggcgatcgtttcaagcgggaccaacgtttcaccgggctgacttcttcgctggacatttttgccacagtggtggatgcgttggacattccggaagaaggattgcacaagccgatcgacggtgtttccctgttgccgtatctttccggggaaaaaagcggtaatccgcatgaagccttattctggcgtaagatggatacgcgggccatccgttccggttcgtacaagttgatcattactcgtggtgtcgattccgtcctgtataatatggatcaggacgtggaagagatgcacgatcttttatcttccgagccggagaaggcacgggaactcatggagcagttgagcgaatgggagcaggcctgttgcaaagatcccctttggatagaagagggttgggccgaaatcacaaacggcctgcatgaatgtttgatgaaaaacgagataaggacggcacaggatctttgataaaaaagcctcggcataaagtgagggcactgaaaaagtttccttgcagctttttaaagaattaaatctgcacatagcctgtatattatttggctatgtgcagattttttgtaccttaatgccataatatttaaggtccatgctatcaccacaacaagaacttccgctcagtgaatatagttcactctacgatatagttgtcccccaagacaatcttcttcgccgcattaatgatcttgtagatttcacttttgtctatcaggaacttgccaataagtattgcaaggataatggtcgaacagcagaatcccctattcgcatgttcaagtatcttctgctgaagaccatatacgatatttctgacgtagatgtcgtagagcgttcccgttatgatatgtcctttaagtatttccttggcatggctccagaggaagacgttattaatgccagcagtctttgtaagttccgcaagttacggctggaagacatggatcttatgaacctgctaatccagaagagcgtagaaatagcgatagagaaaggcatcataaaatcaaggactattattgtagatgctactcatacagaagccaggtctaacccgtactccccgatagagattctgcgactccgttcaaagcaactccgtaaggtactttatgccatggatgataatatcacgcaaaccctgccgtctaagaataaagaggatgatcttgcgcatgagttggattataccaaagaccttctgaaacttatcacttcagatgccagtctttcagaagtgcctgcagtaaagcagcgacttaacatgctcaaggaaacgctttcagatatagaggatcactatacgacctcaaaggatgcagatgcccgcattggtcataaaacagaggacagttcgtttttcggatataagactcacattgcaatgagtgatgatcgtatcataacagccgctactgttacttctggcgaaaagggcgatgggcctcagttgaaagagcttgtggagcaaagcagaaaaaacggaatggaagtgaacactgtcattggtgataccgcatactccggatcggaaaaccttagactggcagaagatgaagagaagggatttactttggtatcaaaattacatccggccataagtcatggactcaggaaagatgaagacaagtttgattataacaaggatgcaggcatgtttgtttgtcctgccggtcatatggcaatcagaaaagcaaggcaggggaaaaaggatgggaaatggaatcaatccatgacttatttctttgatatagagaaatgcaagacttgttcacgaagagaaggatgctacaaggagggggctaaaagcaagacctatagtatacctatcaggaatgaagaacagaaaaggcagcttggattccagaaatcacaagaatttaaagatatagctcgtcaaagatacaagattgaggcaaagaatgcagaattaaagcaggtatacggttatgataaggcactgtcgtatgggctggatggtatgcagatgcaaggtgctatgaccatctttgccgcaaatatcaagagaatattgaaactaagctaaaaaacacttataaaaattacccacgtataatatgatggccttactgactatacaaggccgaatataaactcctatcaagatatataaaagcagattgcaaaaccgatataaaggctaatacaatctgctttcgtctttttaaagattgggattaaatcttaagaggatacctttttcagtgccctcgcataaagtcgaggctttttttatggataaattgtatctttgcagccataaaagagaaaaaatatgatttctgttgaaggacttacagttgagtttggcgggtttacgctttttgatgatgtttcgtttgtggtaaataagaaggatcgtatcgcactggtgggaaagaacggtgcgggaaaatcgacgatgctgaaaatatttgccggcttgcagtctcctacctccgggacggtcagcgtaccgaaggagacgacgatcggttatcttccccagcagatgaagctggcggatacacagacggtacgcgaagaggcggaacatgccttcgagcatatccatgagatggaaaaggagatagaacggctgaaccagcaactggccgagcggacagattatgaaacggaatcgtatcagaacctcatagaccgtgtcacgcatctgacggaacatttccagatgatgggcggaaacaattaccatgccgagttggaacggacgttgatcggcttgggatttagccgtgaggatttcgaccggccgacctccgagttcagcgggggatggcgcatgcgtatcgagcttgccaagctcctgctccgcaagccggatgtcctgctgctggacgagccgaccaaccatttggatatagagtccatccaatggcttgaaaacttcattgcgacacgtgccaatgcggtgatccttgtttcacatgaccgggcgtttatcgataatacgactttccggacgatagagatagagcttgggaagatttatgactataaggtaaaatactccgaatatgtggaattgcgtaaagagcgccgcgaacaacaacttcgtgcctttgaaaaccagcagaagaaattggccgatacggaagctttcatcgagcgtttccgctataaagcgaccaagtccgtgcaggtgcaatcccgtatcaaacaattggaaaaggttgaacgcatagaggtggacgaagtggatacggctatgctgagcctgaaattccctccggctccccgttccggttcctatccggtgattgcggaagatgtggccaagcgctatggcgaccatctgattttcgagcatgccactttcactattaaccgcggagacaaagtcgcttttgtcggcaagaacggtgaaggtaagtccacgctggttaaatgcataatgggagagatcaccgattttacaggaaagcttcagttggggcataatgtgaagatcggctattttgcacagaaccaggcacagttgctggatgagaatatgaccgttttcgatacggtggattacgtggcacagggggacatccgtctgaagatacgggacatattgggggctttcatgttcggtggagaagcgtcggacaagaaagtgaaggtattgtctggtggagaaaagacccgtctggccatgatccgtctgttgttggaaccggtgaacctgttgatcctcgacgaaccgaccaaccatttggacatgcgttcgaaagatgtgctgaaagatgctttgaaagagtttgacggtacggttatcgtcgtctcgcacgaccgtgaattcctggatggactggtagacaaggtttatgaattcggaaataaacgggtgatcgaacatttgggaggtatttatgatttcctggaacataagaagatggatagtttgtgcgaattggaacgttccacccaaacgacaacctctatggaaggaaacgctgcggagccgacccgaaacaagctctcttatgaagcccgcaaggaacaaagcaaggcaatcaagaaggttgaaaaagcgatagccgaatccgaaaagaaaataacggaactcgaaaactccattgctgctatcgaggccaagctcgccactcccgaaggggcggcggatgtttccttatataccgaatattccgaattgaagaagaaactttccgacacgatggatctctggacggaacagaccctcgaactggaagaactgaatgcagccaatagttagcagtcgattcttggtagatacgaatcataaatgatgatttgcagtcctgctatttaagcatggattgcgcggatttccgatcctgctaaaataaggatactgtaattgtaactaataaacaaatacacagctatttactgccattactaccattcttttacttttcgcccttagtcgaaaaggcttttgacaagtgtcgaaagggcttttgaccaagggcgaaaagatcttcgaccaagggcaaaaggtcaatgattgggctgtttgacaatagaagcatggctattgtcacttaaataaaaccttcctggaccgacttactctctctgttttgaaaaagtaaatattaacgcttggtttttaactctctttagaaaatcttcctacctttgcctacttaaaactaaaaaacacaaacttaattcttgcgctatgttaactcagattataaatggaaagatccttaccccacagggctggttgaaagacggttctgttctgataagcgataacaagattttggaagtgactaactgcgatctggcagtggtaggagccactttgatagatgctaaaggcatgtatatcgtgccaggcggagtagaaatccatgttcacggcggtggaggccgtgactttatggaaggtaccgaagaagcgttccgggcagcggtagccgctcacatgcagcatggtacgaccagtattttccccacattgtcatcctcgaccatcccgatgatccgcgaagcagctgcaacgactgaaaagttgatggcggaaaaagacagtcctgtcctggggcttcatctggaagggcattacttcaacatgaagatggccggcgggcagttaccggaaaatatcaagaatccggatccggaagaatacattcccctgttggaagagacacattgcatcaaacgttgggatgccgctcccgaattgccgggtgccatgcagttcggtaaatacgtcacctcgaaaggcgtgttggcatctgtcggtcatacgcaagccgaatacgaggatattcagactgcctacgaagccggatatacccatgccacgcacttctacaacgcgatgcccggtttccacaaacgtcgtgaatataaatatgaaggtacggtcgagagtatttatctgatcgacgacatgacggtcgaggtggttgccgacggtatccatgtgcctccgacgatccttcgtctggtctataagatcaaaggcgtggaacgtacttgtctgatcaccgatgcgctggcttgcgccgcaagtgacagccagacggcgtttgacccgcgtgtgatcatcgaagacggtgtttgcaagctggccgaccgttctgctcttgcgggcagcattgcgactatggaccgcctgatccgtacgatggttcagaaagccgagatcccgttggaagatgccgttcgcatggcttccgaaactccggcacgcatcatgggtgtttacgaccgtaaggggtctttgcagcgaggtaaggatgcggacatccagattctggataaggacttgaatgtccgtgctgtctgggcgatgggtaaattagtggaaggaacgaataaactgttttgatttatgctgacacaaataataaatggccagatccttacccctcagggatggttgaaggatggctccgtattgattagcgacggaaagattctggaagtgacgaacagcgacctggctgttatcggcgccaaggtggtggatgccaagggtatgtatatcattcccggtttcgtagccatgaacgtgcatggcggaggcggccatgattttaaggaatgtacggaagaagccttccatagtgctattgccgcccatatgaaacacggtgcgactactatttttcccactttgtcgtcttctcctaaagaatcgatctgcaaggcagtctccatttgcgagaagctgatggcggaaaaggacggtcccgtattgggacttcatgtggaaggaccgtatctgaatgccaagatggccggtaacctttatgatgtgaaaaatccggataaggaagaatatatgtctatcctggaaagtacgaactgtattaagcgttgggatgccagtcctgaattgccgggtgcgcatgatttcgcccgttatctcaggtcgaaaggtatcctggctgccattacgcatacggaagccgaattcgaggatatcaaagaagcctatgcggcgggttttacccatgcggcacagttctacaacgcaatgcccggtttccacaagcgtcgtgaatataaatacgaaggaacggtggaaagtgttttcctgatggatgatatgacggtggaagtaattgccgacggtaaacatttgccttctacgattcttcgcttggtgtataagctgaaaggtgtggaacgcacgtgcctggtaaccgatgcgttgtcttatgctgcaagcgatgtgaaaccggacgaaggctcacgtattatcattgaagatggtgtttgcaagttggccgaccattcttcgcttgccggaagtatcgctacgatggatgtgctggtccgcacgatggttcaaaaagccaatgtcccgttggccgatgccgttcgcatggcttccgaaactccggcacgcctgatgggggtatccgaccgtacgggtacgttgcagcgcggaaaagatgccgacatcatcatcctggaccgtaacttgactgtccgtgccgtttggtcgatgggaaacctggttccggctgccaatacgctgttttaagaagattagaactgataaagaatgaagaacaggtttgtggatgacgcggataaaacggattggaattattttatccgttaagatccgtccgatccgtgtcatccgcgaacctggttcttaaatgatacatttgattcatctctgccaaaatccgtaatatcaatatttcctataaccgtattgattttttaaatgctctgtaaagctaagttcgtttatttattagtatatttgtgattcaagttatgatataatatactaaatcgagaattaaacatgaaaacagaccttagttcgcagattaccctgacgcgaataccgcagcggtattatcgcccggagaatgcttttgagcattcagttttgacccgtctggaaaagatcccgacaaacatctacgaatcggccgatgaaggttcgtttgccatcgctaaggagatagcagaccagattcgcaagaaacaggaaatcggtgaaaactttgtgatggctattcccggaggccgttctccgctgagcgtatataaagaattgatccgtatgcataaggaagaacaactgagcttccgcaacgtggttgtctttgttgaatatgaattcttcccgcttgtctctccttccgccggcaacgtggcacagctgaaagaggctttgctggaccatatcgatattgcccctgagaatgtttatgctcccgatggatgtatgccgaaagatgccatcatcgatttctgccggatgtacgaagaaaacatccagaaggcaggcggtttggattatatcctgttaggtgtgggacatgcgagcaacattatgtttaacggtgtaggtgcgacgctgagttcgcgtacccgtctggttctgttggaaggaactgcccgtaaggaagcttcccgtacgttcccgtcactggacaatgtgcctgcgggagtcatcacgatggggatcgctaccatgatgaaagcccgtaatgtgatcctgatggcgtggggtgaagataaggcgaagatcatcgccaaaacggtggaaggcaaagtgagtgacgctgttccctcttcttacctccagaatcatacgaatgcgaaagtcgtagtcgatctgtctgccgcgtatgatctgacacgtatcagtcatccttggctggttaccaattgcgagtgggataacaagctgatccgtcgcgcaatcgtttggttgtgccagttgacaggcaaaccgatcttgaaactgacaaacaaggattatagcgaaaacggcctgggtgagctgctcgccctgtacggttcggcctataatgtgaatatccgggtattcaacgatatccagcacacgattaccggatggccgggcggcaagccgaatgccgacgattcaaaccgtcccgaacgtgcaactccgtatccgaagaaagtgattatcttcagtccgcatccggatgacgatgtaatttcgatgggcggtacattccatcgtttgtgtgaacagcatcacgatgtacatgtcgcttacgaaacttccggcaatattgccgtaggggatgaagaggtaatccgctattgcgaatatctgcgcgacgtttgtgccaaatatacggaagacgaaacggttaagaagaaagccgaagaaatcatccatttcctccgttatgaaaaggtggaaggtgaagctgaaaaacgcgatgtcctctttatgaaaggtacgatccgccgggaagaagcccgtgccggtgcccgttacagcgggatcaagagtgacgatcatatccacttcctcgacttgcctttctatgaaacagggctggtgaagaagaacgacttgagcgaagcggatattgccatcgtgaagaagttgctgacggatgtgaaacctgatgagatgtttgtagccggtgaccttgccgatccacatggaactcatcgtgtatgtctgaatgccgttctggcagctatcgacgagctgaaggatgaagaatggctgaagaactgccgcatctggatgtaccgcggggcttgggccgaatgggaaatggaccatgtggaaatggctgttcctatctctcccgaagaattgcggcataagagaaacgcgatcctgaaacaccagtctcaggctgaaagtgcaccgttccttggagacgacgaacgtttgttctggcagcgtgccgaagaccgtaaccgtgctactgccgaactgtatcatcagttaggccttgcatcttatgaagcgatggaagcattcgtacaatatgttccggttcgataagtaaaccggattgtcataaaaaagagagggcggcccgatcatcgggccgcccttcttggttgttttaatatatctattatgaattagtaagtggttccctggaaaacattggagtcagaataaggaagcaatgttccgttcattgtcaggttgtttcctgagaagttcgggtctacggtaaccattgcattattggtcccgctgtataataccaggtttacggttgcagagataaagataccttgtacgctcatggacagatacacgtttccgttgttttcttgtttgacctgtacattggatgccgagccttgtacggtgatgccgcctaatccgttaggaccggggtaaggagagttggatgcgatctgaaccatggcctgtccgtcattcaacgaaacgaagttagtgtttgagtttacatagtaaacacgtccgttcaacggttgtacggagttggcttcgagcacgaacgaccggtttgtgatagcctgcatggcattgttgaatgcttcttcgcccataacggcgtccttagctaacctttcttcttttttctcttttctttcctgctttttttcagctttttctgcggctttacttgtctgagcctgcacatgtgtcatgccacccaacagaagggtgaagatcaccatcatagatacaattcttttcatacgacttagtttaaaacgtttattcaaaaatgtaataaaagaacaagcagataggggaaatgtttaaaatctcccgtatttttgcaggtataataatcgtttgatatgaaaatagatgtttgtttttcaccggcattatatccggtctatcataatccggaagctatcgtggtggtcgtggatgtgtttcgggcaacgacgacgatggccgccgcttttagtaacggagtgcgcagtatccgtccggtcgctaccgttgaagaggctgaggcatataaggcaaaaggttggctggtcggagcggaacggaatgtgaagcgatgtggttttgccgatttcggaaattccccgtttgattatacggcggaaaaggtttccgggaaagatattgtgttcaccacgaccaacggtacacgtgcgatcacgatcgccaaatccgctttccgggtcataacgggagctttcatcaatctgcaggcggtggccggttactgtgtccgccataagcgggatgtagtcgtgctctgttccggctggcaggataaggtgaatatagaagatacgctttttggaggagctttgacggatgcgctactgaataccggtttgtatgaggcgggcagcgatgctgccgtgattgcccgggatatgtggacgggcaacaaggcgaacctgcttgcctatctggatacgacggatcatatgggacgcttgaaagcgaaccatctcgaagatgctgttccctattgcctgactttgagtattacggataaggttcctgaactttcaatagagggagatacattaatattacgctgataaggaatggaatatatggaagaacatggtggaaaagtacgttttggagtagtcggaaccaactttataaccgactgggtgattgccggagcgcggcaggatgaccgttttgaactggttgctgtttattcccgcaagcaggagacggcggatgcctttgccgccaagcatcagataccttatactttcacctctttggaggagatggcaaaaagtccgttgatcgatgccgtgtatatcgcatcgcctaatttccttcatgcggaacagagtatcttgtgcatgaagcatggaaagcatgtactctgtgagaaacctttcgcttcgaatgcgtgggaggtgagagagatgatcgcagcctctgcaaaatatgacgttacgctgatggaggcgatgaaaccgacccttaccccgaatttccggtctgtgcgggaaaacttaggacgcttgggaacgatacggcgttatttttcctgctattgtcagtattcttcccgctatgataagttcaaggagggagttgtgctgaacgcattcaggccggaattgtcgaacggggcgatgatggatatcgggatttatactgtctatccgatggtcgttttgttcggacgtccgaaaaagatagatgcttcaggaatcgtcctttcatccggtgcggacggacagggagccgtcaatttcgaatacgaagggatgaatgcgaccgttctctattccaagatagccaattcatccttgccgacagagatacagggagaagagggaaacataacgctcgaccggatcaatataatcggagaggtaaaatatactccccgtctggcggccgcttccggtagaggtccctctgccgaagctcaggatataagcgtcgtgacggacaaggatgaatattattatgaggtggcggagtttatcgatctggttctgtccggcaaacgccagtctggaatcaacagccacgaacactccctgatcacgttggagatcatcgatgaggtgcgcaggcagttgggaatccggtatccggctgatcgatattgattgttacttttctcccaagagaaaagtaacaatcaatattcccgaaggaaataccgcatcaggaactcccagttctcgtgaacgatcgctttgctacgttcttcaccggccaggctcttcgcttgcgcatcggctaacatgcctttttcttccaatattctcagcagatacgggctgcatttccggatcatgaagaaggacaaaccttggttttccgcctttttctgattgtagaaaggattgttttcgtctttgatatactcaacaccatcggccaggacttgcaaaccttctgacggagtggcataaacggcaaatttccgggaggcggtatcgcctgtcgctccttccgtctcgatgccgatcttcgtcaggaaatcgaggaattcacgcttgttttggaaataaaggagtgcttttccttctgccgctgccgtgaatttctcaaagtgctcggtcagcattttcttgctctcttcggacaccggttctttgaatgcctgtgacttttcaccttcttcaacgaacaagctgtgatccggatgatctgccggaaagatcagcgaaagccatttgggagccgtgtaagccaaaaatgcacttttggaaatatgtgccagagcctcgtaggcggtcatgatgaactgctcgtctttctctttcgtttgttcccaatattctttgactgtatctgtcagttcctggtgtgaatcggtaaacaggtaacattggtaatggaaccagtgaagcaactcgttatatttgtcgacatcctcatagcgggtttccggggcaaagagctgttgcagccgttcgttctccggtgcagttgtccattcgtcacagaacatctggtagatcagtttggctgtgtcgccgtttgccgcattgtcgggactgacgaatgtgcctttgtgaaacccgtgatactgctgtgtgtaatgccaaagcaagaaccggatatcttcgtagttgacctcgtcatcataatagtgatcgtcaggtgtataaaacggcaggaatttaccgtataaggctttgtgttccgtgatgaatgagcgccagatattcagaccggaaatcacatcttcgaaataggcagccatgcgtatactgatctgtttgacctcgtccttctcaaaagaataggcaagacgtgtttcttccaacatgccgtaaatacggtttgcgatattggtataataggaatctgtcggatctgactgtttataagggtgcaactgcaaccaatctttcggatagattttaatgttcttcatactatagattatttgtgcccaatcgagcaataattttaaggtcacaaatgtaacaaatattttacaatttattgttcggcagcacctcgtctttgaactgttcgtgaatccccctcccggctgtgtgcagagagggggatttttatgtgggggcggtcgcgatcgccctcagtttgcatataataaacagggttagcgtacgattattttccgtggcatttctcttgagaagcgtacaatgtagactcctgctgccaatccattgagccgtgtgtcgcctaccggaatgttgcggtagaagagagtgcttccggcgaggtttaccacctgtatctgctgtggggaagaggtgtggatgaagatcgtgccgtcggcggtccatatcttcgtgtctgtttcgatacttttgatacttgttggaagattcttcacgatgccggagatagagacgacaatgtcttcagccacgttgttgatcttgtatctgccattcgtgtccggtatgatcgtctcgccgcgatcggtggtgacaacagggatggactcactatagttttcatccaaggtgatggcgaaggtgaaactgtatccttcctcgaccgtatggtcacctgcctgcttgctgagtgtcgcaccttccacggaggggagagtgacggtgtagtaggtggctgccggcggagtatatatcctcttaaactcggcagcgactgtaaaatcaccgtcgggagcagtaaagctgccatctgtatcaaccgtcacattgttattaccctgtcttacagagaagcttttgatactatatcctggtgaaggagtggcgattatagtcatcggtgtgcctgctgggacttggtcaccgttttcaaagagggtttctccctggtcggctccgatcgtgcctttgagagctagcgtgccgttctcgactgttgtcggaagggtgatggcacacaatgtggcgttacccggatagcggtagttgaaaccggctttatagagcatcttattgtcggccttatgggtgaaactgtatgtacccgacagttcggaagccgtgataatcgactggttatccgatgcttttccgttcaaattgaccagatggaaatctccggtcagtccggtcccttctatttccatagtctctccgttccccatgtcgagcctgaatgccgatgtctggtccttttctttgataaaagagttttccaggatgactttatcgatggagcgcagttcggaaatcagatagggagtgtcggctgttccgcagtttctgtaggttacatgtgttttgtggttattgttgctgtctatttgtccgatggtggtatggcctttttctatggtgatctggattattccgctgtaagtgggagttggtgaatctgcagacaaggaatagtcgatgccacttattcttttgacctctcctcctttcacgtttatgttgatcttcccctcgacggctgaggagcaaccgatcaggctcccggtgattctgccgtccagaacggtgagattgacatttcccgaaactttcccgtgtactgtattattgtagttaataccagctccgtgtacttcctggatgggattatctgcggatgtgtcaagtgtcacatccgtgttgcctgctgtgccggttccttccgtgttgccgatgataaagccgctgacaaccgtgttatcgccagagatattcgtcgtggctgtaccggtgacgtccccgttccagccgcctccgtagatatagtttagagttcctccggtaatgttcaactcggtattgccgactgtgcttcctgcggcatggcttccaccgaaaacagagttgttcacggttccgcccgatatggtcaccttggttgtccctgtgatgttaccggcattgccgccgccgtagatccagccgaattgtccgcttttgattacgatattggttttgtcgatcgtattgttgtctttagttcctccccagatgttacgtatgccggtcagggggttgccgttgttggtgtatgtcgacgggcggcaatcgacagactcgtcgaatgtcaaatcgtggccgttggcataaatggtgctcatgttcagtttgatgcttttgaaggtaagggcggcttgcagttcgaggtcgccggcatatgtcaacgtttttccgtcgcctgttatgatacagggttttggaggtgtgcttgtagctgtttcgtcgtctaacagagtgatgatattgaccggttcttcggaacctgcgagtgcagctgttgcctccgcccatgttttgtaacttgtcccgttgaggtcaaccttgtctttggtcaccgtgtttcctgttatctggtttgcggtcagtgcacctttgctataaatggttccttgattatccagtgttccgtttacggtgagcgagcagcctgtcgggatgaaaagcgtctgtccgttcttgatggtgcagtctcctgacagcgtcacgtctccgtatacttcaccataatatcctaatgtcccggtgttccggtagttgtagaacagaacggaattttccacctttatgttgtggttgtagagaggtaaaccggaaggattggtcgttttttcccaagtgatatccaaccatgcattgttcctgaggattgtttcacccgtttttccccactctccgttttcgtctttggcattgcctcctaccgacaggccgtttgtgatgacggtcgagctttctatcacaagtatggctttgttcttgatcgtgctcgtacctgcgttaaaaatggcgctgggggtgttcgtgctgttcagggttaaggtcccgtctccctttatagtcagggttccgcctgggtcttgctctgtggaaccgatattgaagaggatggccctgcttgctccttcgatgtaattgtctccttgtagcgtgattgttgaattgggaggaagctctatgcccatcatctgacttgtccttaggtctattccgtcaagagccagtatcttgttgctgaggtcccaacgatatccgttgccgtttatgtctgttgtagcgtttgcgcagtcgatggtggttgtgacggtttgagaggataccgtaaatggcattagtatcatgatactaatcaatacgccaagaatctggcgtattgtacttttgatatttaaatctctattcatgtgtatgtagttatttaggtgttatgaaaaaagcatccaatttgatgaatgcctcctttggatgcaagggagagattcacttggaggtagtggagatgtttccttcgaggcgagggagcctctcccttggctcgaaggaaacgtctccatcgttgtcagagttcgccggggcgttcctcgtcattgcttttcccgtcgctcaagaggatggggaagcggtaggtgcgcgggtttttcagcatcttgttgctgctgctgtattgtgttgtcacgctcagcgtgtacagaacctttgtttcgatggcggggagcatgacggtgagttcggatggggcgttgcggatgatgaccgggcatttcatcggagctgcaccctcttcgtccttggtcaggaagacgccgacagacgggtcgtcgcctatcactttggcattgctgcaactgatcacggcggggcctgccgaggtgatgatctcgttgacgctgccggtcgtgctgtcggtgatggaattgatgaccggacctgttttggctgtgccattgcagacgactttggtttttttcagctggctgcgcagaagctgaccgggcgtgtaggaaacgcctaaggaatgtttgacaggatcgaactgcgcgttttcaccgataaacgagccgcgtgcggtgacgaggtattgcccgacgccgtctattacgctcttaccttcggcgatggcttctactttcgctttgtcggcacgatcgaggatatactcgatgctttcctgtttgtactccgtacctgctttcacgatacgggcggctatctgtttgttgtacagagtgccggtgatacgagggcggccggtgtagtcgccttccttctccgtcatgatgttgtcgtagagatcgatgttgagagtgatctgttcttcttcgttggtcatgattccaatgtttaagtgcccggtggttggccgggcgttaaccgtttggaggcaaagatggggagagaaggacagaaaggatgcccaaaatccgtaaagttgtgcccgaaatcagcaatgatgagtatgatgtagttttgtccgtcgggcggacaggggtgttcctctcgggagggcgggggtattcctgtcatgtgcggctccggaaccgggaaggggttgttttcatcagtttcaggaaattccggttgtaggtgcttgtagactggaaaccggacgagaaagcgatgtcctcgatcgtgcgctcggcgttttcgggcagtagcagcaggtctgcggagtggccgatgcggaggcggagtacgtagtcttggaccgtcagcccggtggcacggccgacagcggtcgagagcttgtgtgggtttgcaccgatggtcctgggcaggtcggatatcctgaagtcagggtccagatagggctgctctttctgaaaataggcttctatgtccttgaagagacggttgttgtcgtcatccggttggaggtagcagatcaattcttccatgtccgctccggcgggaggagaaaaggctgagttctgttcacggatgcgggttcggacatcccgataggtggaactgaagtttgcgtagaagattccgaaggcgaaatagaaaacggtgaataggaaggtcacggtgatttcgtgaggcaggtgaggattcaaggcgaggctcagcgtacaaaggccgatgcctgaggcaaggaagaacgcgcttgtcacctgtccgagtttgagccacctgtcttctgtcttcactcctcccaagagggagaggtaagtatgtcgttcgtgcaggaatagttttgcatagatgcctgactggatgatgtaggcaagcagatagagcgtgcggatcagggaaggcggattcgtgaccagtgacttccattccgagtaagcatagacggggtggtctttccagatcaggcatgctccggcgtaggctagggtgaagaggagggaaggagttgcgtgcagcaggatccgctgccgggtggcatactgttcgttgaacagcaggatcagtgagaatgtgaacagcagggtttgcgaggaggcgatcagggtgacgggaaacgaggcgatgtcccatccgacgggttgccattttctggtggtaagcgagatgaggagaccgatggccacgaggaaggtcgcaaatgcgaggatccgccgtgccttcaggtaaacagggtttgtctcgatattgccgtagttcaagaacagcaggatggcgcaactgcccaggctggaagtggtgctggtggcataagcgatgatgtataaagtgtgtatgtccattctgcggtcgttgtgatagttttgttattcacatagccatcttgtgatattctgttcttcggcaaattccatgcagactttgacgatgtcacgtctgtcactttggtaggggatgaggcttcttttgccgaacctgtggaggctggtttgtattccgattgggagtttgcgcatgacctagttcatcgtatattgtttatttaattgtttccaaagatactataaatagtttcttagcagccttttttctcgtaaaatctgctatgggtggtcgctttgtcaaatggttgctttctttttgttgtcaacggattgtaataatcgtttttacaatgtaattctgtttacatcttcttgcaatacgtcccttctacttttgccggcaaataaatgtaacaagtaataaggaatgggaaacaagtgtgaaacaggcaatgtgaagaggttctttcttttgttgttggggagttttctttcgttgtctgcctgggcgcagacaggcgttatttgcggaacggtgtcggatgccaaattcaaagatgcgttgatcggtgcttcggtcgtgatcgaagggactacggtgggggccattgccgacgtggagggaaacttccgtatagagaatgtcaaaccgggaaaatatacgattgtcgcttcttatgtctcttataaatcggaaaccattcgtgatgtcgtggtgaaagcccatcaggagtcggtgctgagaatcgaactgtccgatgccgacctgcaacttcagaatgtggtggtcgtggcacaacgaaagttgggaacggaaaccgccattatcaatacggtacggaaaagcctgccggtcgtaagcggtatttcagcccaacagatcggcaagacacaggacagtgatgccgccgaggtgttgcgccgtattccggggcttacgatcgtggatgaccgttttgtggtggtccgggggttggcgcaacgatataataatgtatggctgaacgaggcgaccactccttcgagcgagacggacagccgggcattctcgttcgatgtgcttccttcttcgctgatcgacaatatgatggtctataagagtccgtctgccgagctgccggccgatttctccggtggtttcgtgcaagtgatgaccaagaatataccggacgggaataccttcaacgtatcttaccagatgggatttaatacgaatgctactttccggagtttccagctgacggacgggagttggaaagactatctcggatttggggccggggtgcggagtttgccctcttctttcccttctcatttaggggattattcgacagaggaagccgctgcctttacacggcggatcaaccagaggtggggaatcaacaggttcacggctattccggaccaaaagatttcgctcacttcacaccgatccttcgatgcaggcgactggaagatcgggaatatcgcgaatgtgaactggagtaccggctacgattattcggagacggtgaataacaactatatcgcctatgatgtggcgaacgatctctcacgtccgcgctttgagtacaacgatgtccgctataagaatacttccaagttaggagccttgttcaactggtcgtttatgaaaggcgatcataaatacgagtttcgtaactttttcagccagcgtggtgtttccgccctgacacagagggaggggatgaactattattctgacaaggcgatccgcaagtgggaatccctttataccggacgtacgacctattcagggcagcttggcggcacgcatacgttacaggaggatatcaacaaagtggactggactgccggctatgcttttgctgcctatcgggaaccggaccgcaagatcgtcaattccatcctcgacgagacgaagacggacttaccgaattattacgtctccgatccgatgcgctattaccaggacttgaaggatcacggtatttcgctcgctgccaattatgaacataagttcactgtatccgacaagttcgcccctgttcttgacggtggtgtctatggagaatataagagtcgtacgttcgatgctcgccgattcggttacaatctgttaggtaaagggtatgaccggtatgccgattgggattatacggggctgttctgtgatgagaacatttcggcagacaggatatggatgcgtgagacgacgacgaacagcgactcctatacttccgaaaatatcttgggagccgcttatgtctctgccaagttgaactacggggaggcgctgaatgccaatatcggtgtccgtatggaatattataaccttaaaatggatggttacagttcagacggtacgactcctgttcacttggataaccggacgagcgattttttcccttccgtcaatatctcttacaacctgtctgcgaaacaccttgtgcgtgctgcttacggccgttcggtcaaccggccggagttccgtgaggtagtaccatatgtgtattttaatttcgagcgggatgcgaatatagtcggtaataccgaattgaagaatgcttatgcggacaatctggaggtgcgttatgaattctatccagcatccggcgagatgataacagtcggtgcattctacaaacgtttcaaggatccgatcgaggaaacctataacgaggcgggttccggtttgcaatatacctatcacaatgcgaagaatgccgagacgttcggcattgagttggatatgaagaaaagccttgactttatcggattaagagggttgagcttggtttgtaatgccgcctatatccatagccgtgtccgctttgaggaaggagcgcctgaacgtgaccggccattggcggggcaatctccttatctggtgaatgccggtctgttttatcagcacgatgacaagagaatcttcgcttcgctactttacaaccgtatcgggaaacgcatcgagtcggtcggtgtcccgatgcaggatcagaatgaagatattcccgacatatatgagatgcctcgtaattccctggatttgactttttcgaagaagatcggcaaagctgtcgagatcaaagctgggattcaggatatgctgaactctaaaatcgaatacaaacagttcgtgaagttgacggaccagaacggcggcaagcgtgaacgtgaacagctggtacgcagctaccgtccgggagtggatattaatgtcggtgtttctctcaagttttaaagtgaattagaatatatctctattacaaacaaaatgtttttattatgaacagatttctattgaaaggtttggcctctgtatgtgcgttggccgttatgtttggaactgtatcttgtagtgatgatgacaagcctgatggctctatagctgtatcggctgttgccgtaagtcctacgactgcgactgtcaaggttggcgagtccgtgacattgtctgccaccattactccggacgatgcaacggataaaacgataacatggagttcctccgatgaaaaagtggcaacagtagatgccggtaaggtgacaggggttaccgagggtactgccacgatcaccgctacgacaaaggatggcaataagacggcaacttgtgcagtgactgtttctaatgaggctccgtcttccaaagaagtgatcttggagggagagataacttccgatcttacgctgaatgctgcagataaaaactatatgaaaggttttgtttatgtaaaaccgggtgctacgttgacaatcgaagctggaacggtcatcaagggtatatctgtttcttctggtgaaaaggctgcctctttgattatcgaaccgggtgcgaagatcatggctgaaggtacggttgacaaaccgatcgtctttacttccgataaagaaccgggcaagcgtgcgacgggagactggggaggtttgattatctgcggtaatgctcgtgtaaaccagacaaaaagaccggttatcgagggtggacccggaacggaatatggtaacacgacctccgatgaatttaatggtgaaagctctggtaagttgaaatatgtccgtattgaatttgctggctatcctttggaacccgacaaggagatcaacggtctgacattcggtggtgtcggtagtggtacggaagtggagttcgtacaggtgtcttattctaatgacgattcgtatgaatggttcggtggaacggtcaatgctaagcatttggttgcttacaaaggttgggacgatgatttcgataccgattacggctatacgggtaacttgcagtttctgttgagtgtgcgtgacaaggacatcgctgatacttccgactctaacggcttcgaatccgataatgatgcaagtggttcttccaataccccgcttacgaagcctgtcttctccaacgtgactttgatcggtccgttctatggaaaggtttctgatatgacacaagccgaggttgaagcaaagacagccgatgccgctaatggagccaaaggaggtaaattccaggctgccatgcacctgcgccgtaattcgagtttgaatgtctacaactccgtattcacgggatggccttacggacttcgtgcaacggataagaaaggtacggcaaatgatggtatcgccgttaagaatgtaatctttgccggtatgtggaagaacttctacgatgacgaaaaggtaagcgagaacttcttcaaccgcgctggtaacaatactactttggcaaccaccaacgaaattatttcaaaagacggtgactattcttctgttgttgcttctgccgtacaaggagccgaatttgttgatgaagtcttgaataacagcttctttgaaaaagtaacttacaaaggagcttttgatggaacaaacgattggacagccggttggacaaactgggatcctcagaacactgaatattaaaaagatgataaagagattattattgacatcaacattattggcaagttctgccctggcaatccaggcgcaggacttgttccttagtgaaggccagtattatacggacgagtctcaaacaactccttacactggccgctataccgagttttacgatgatggtatgttgaagatggagcttttcctcaaagacggccgtcccgaaggaacttatgtgatttactatcctgatggaaagattgcggaagtccgttcttactatcacggcatttttcatggagaatggcgtacttataacgaagccgggcaactgaccggtattgcttcctataaagatgggcaaaaagacggaccttggcgggtgtggaacgataaaggcattcttcgtttcgaaatgttttatgctaaaggaaggaaaagcggcatttggcgtacttgggatgatgatggcaagctgttgacggaagagaagcaagaggagtaagcgtggggatcaccattgcattctgcgtaggcattgcagtattcctgcaaaacttatgcagaatgcaataaaaaggctatcggttccctaaatcgtcatacaaggtttgcaggagtgcctttcctttgcggagtcgcaagtcactgccttttcggggggcttcgatcagaggtttgttcccttcgttgtcatagacggatataccggtgctgtcgataaacccgaatccgttagaataagtatagaatgcatattccggataatcgggacttaggatgttccggctgaaagtgaaagtgtcgtgatcgatccctaactggttcaatagggtggcggcaagatccgtctgattggctaatttgtcaatcacgacaggttctttcaccgcaccgccgatccaaagcatcggaatatggtagcggcgaggttcatagttgaccacatctttcggataaggatatccgtggtcggaaacgaaaataactagcgtatttttccatacaggcaattctttcaatttgtctatgaagttgccgatacaactgtccgtgaaggcaaccgagttcggatacagccccatttcgtccaaccggtggtagggaacttcaaacggctcatggctgcttaacgtcaggaaagtgctgagccagggagcttggttgtcccggtttttgatgtcttcgtacaggtggcggaacgtaatatcgtcgttcgctccccatttactcaagcggctggtgagcggaaagtcacggtctgccgtgatccggctgtaaccggaactgaagaaataactctgcatattggtaaagttgatatcgcctccgtacagcatgtcggcaacatatccttcgtttgtcagagttttggcgatagaggggagtgtttggctttttgccggatacttcatgatggaagtggtcggctgtgccaaatatccgttcaacaccgaaacgattcctctgtctgtccggaacgaattggcatacatgtttgtgaaaagtactccttcccgactcaatcggttcaggttaggcgtgatgatggaatctccgccgaccgctccgatcgcgtttgccgagaaactttccatcaggataatcaatatattcggtcgtgaggtattgagaagggattgcagaggcttttgctgtaaatctgcatctgcgggattcgtccctttgcgtccccgcatcgagtgcggagacaaagtatccattacctccttcctttcctcttccgggaaaaaattgaactgtgccgcaaaatcctgttgcttgctaagtgaagcgatcaggctgaaacaaggattgattgccgaatggttgaggaattggttttggctgaaatataccatccccacgttcgccgtcgaagtcgttacgcctcctcgtatcggaatgaagagtatccctcctgacaggataatgataaggcttccgcccaaccgtttccgcaccagtgtttcagggaagagcggaacgataaacctcttcaacacccaatatatcccgaaagcatatacggcgaacatcagcaattgggcaaagaattgccccagcggtacacttgccatcgcatcgccgggtgattgaagatagaagaaaagagtcgcatccagcctgaatccccagtagccgtataaagccacatccacggaaaagatcgctgcgatcaataccgccatgattccgaaatatcctttcagcagtttcctgtaaaaagaccccggcaaccataccgaaactaacgtcatcagcaaaggtaacgctgtcagatagccggctatcgtacagtccaatagtaacccgtgtgtaattaccttaaggtaatcgattagcgagcatccgctcgctaaggcatggtggtacagcataaacacaggcttctggattgccaataatggtaaccacatgaaatatagggtaaggaggaagaggattctttttttcatatacagggaaggtatcagagaaagaaccagatatatgtcatccacatatctggtttttcttctggaaagttatcgatgcttgtttatttataaagcttttctctcagctcggcaaccatcggatcggtaatataatcgtcgtattccattatacggtcgataatgccgttcggagtcagctcgatgatgcgattggcaaccgtctggatgaactcgtggtcatggctggagaacaggatgtttcctttgaatgactgcaatgtgttgttgaacgcttggatggattccaaatccaggtggttggtcggcgtgtcgaggatgatacagttggcatccgtcaacatcatgcgggagatcatacaacgcatcttttcacctccggaaagtacactcactttcttcaacagctcttcgccggaaaacagcatacgtccgaggaagcctttcaggaagacctcgttcgtgtcgggcgagaactggctcagccagtcgatcaggttataatccgagttgaaatacttggagttgtcgagcggcagataggtcgtcgtgatggtttgtccccattggtacgttccggcatcggccttttcttctccgttgatgatttggaaaagggcggtcatcgcacgcgggtcgtgactgatgaatacgatcttgtcgtctttctccacgttgaagttgaggtcctggaaaaggactttcccgtcgatggactttgtcagcccctttacttccaatatctggttgcccggttcgcggttgggcgtgaacaggatacccggatagcgtcgtgaagaaggcttgatctcttcgatgttcagtttctccaacatcttcttgcggctggttgtctgtttagacttcgctacgttggcactgaaacggcggatgaactcttccaattctttcttcttctcttccgctttcttattctggttctgctgctggcggagtgctaactggctggattcgtaccagaagctatagtttccggcgaacatctgcagtttaccgaagtcgatatctaccgtatgcgtacagacagagtcgaggaagtgacggtcgtggctgacaaccaacacggtgtgttcgaagttcgccagatagttttcaagccacatgacggtttcaaggtcgaggtcgttggtcggctcgtccagcaacaggttatcaggctgtccgaagagggcgcgtgccagcaggacacgtactttctgcttaccgctcatgtctttcatcagcgtgtagtggaattcttccgcgatacccaagccgctcaagagggcggcggcatcactttcggcattccagccttccatctcggcgaacttctcttccagttccgatacgcggataccgtcggcatcgctgaaatcaggttttgcatacagggcgtttttctcgctcatcacctcccaaagggtggtgtgtcccatcaacactgtgtccattacggtgtattcatcaaatgcgaagtggtcctgactcaatacggaaaggcgttcacccggtcctaaagacactgttccgcgtgtaggatccagctgtttgctgataacacggaggaatgttgatttaccggcgccgttagccccgatgataccgtagcagttgcccggcgtgaacttcatattgacatcctggaacaggatacgttttccgaactgtacgtccagattgttaaccgttatcatatcttatatacctattaatttgcttttgaatggacaaaggtacgaaaaatatcgcaaacccatagctttatggatactaacgcatagggttagcttctgtaaagctatgggtttgttattcctttctgaagttttatttatacaatccttctcttgacagcagatgctccaagttggctactcccagcgtcacgatcgccattactgtagcggcatgttcctgatattccgggatgcttttgctgtaagtgtcgcgttcggtgtgccagatctcaccgtagttgaagttgtatcctttgatgtccttttcgttgaaggcgatggccgggactgcttcgacagcaaaaacggatgcatccgtaccggcaggtttggcaggtttggtgaatgggccggcttctttcacttcgaacggatagtcgggatggatcttcttgacgggcgcgcatatcttcacgaagtcctgatacatcgctttcggaacattgagtccgacgggaggtgtcgggcctccgtcgcggttgaacaagttggagattttatctaatttatctttattggctttcacccaggctgtagaacctaacaatccgaattcttcgccagcaaaagcacagaataacatcgtccgtttaggcttcgcaccggatttcatgatcatgcgggccgcttccatcaccggagtgacgccggaaccgcagtccacgccacctgtcgccacgtcgaacgcatccagatgaccactcgccatcacatactcatctgggtatttggagcctttgatcttaccgatcacattatagtattttaccggccccatacggaaatggttgcggatatcgaattcgaggaaaaaggtacggcgttcctttaccatctgtttgatggtagcatattggtgttcgtccaacttgatgtcgcaaacttccggtaggttatcgaaggtgaaagtcggatcgtgcatgacagccttgtcatagagtgcacgcaaaggaacggaagctgattggataaagcccaatacaccggcttcgcacatctgtttgtagaacaaggccgggacatcctctttcaatggcagcagcgggttgtcggtattgttgcgccagttatcctccatgatctggcggttctttttggccgtttcgttgttttcggaaatgatggcggcacggatggagtcgcctttggcggaccggtcgaccggccagccgacattcttcccgttgatcagcacccaagccccttttagttgtcctttcatgcggtcgaactcgctttgggtaagcggttcctgtaagacatgtccgcgttgtacaccctttgttccggcggtgtaggagggagtgacgaaatgcagttccatcccgttttctcccaacagtttgccgaaccacggtcctcggttgaagccgaccggcagcgtgccggcctcttgtagttctacttccagtccccattccgtaaatttcgaggcaacccattcaactgcattatcgtatgcgttcgagccgatcacacggccgccgatgcggttggtgagtacatctaaatgatccatcacttgattatccgtttgaccgatttcgatgattttgtttacagctgcgtcctgtgccatgaccgaatgaacagtcatgcaagccatcgaagcccaaataagtaaagtccgtttcatattgtgtgtttttatggtaatgcaaattaagatataaaaagcgtctgctccaaatctccgcaaaggtaaaagtaggcttcaggcaggaatgacaacgtgtgtaaggtcccattgttatcttcatcacgttgccgtttaggtttcttaataaggtaaatgcgaggtgtattcttagattatacttacttttgtatttgaaacagaaataggaatatgatattttactttactggaactggaaactctctttgggtggcaaaggctctgagtgaggcgctgggagaaccgttggtttcaattgcagatgaactgcataaggaaaaggatggttgggtctatccggttcgtccggatgaaaagatattgtttgtctatcctgtgcattcctggggaccggcagtgtctgttacccatttcatctctcgtctgactttaaacggatatactggacaatcggtctattccgtttctacctgtggagatgaatgcggatatacagatcgactgatcgggaaagctttggaaaaaagagcgatatcgctaacggcagcatactctgtcattatgccgaacaactatatcttgctgcctggtttcgatgtagacgacaaagatgtggaggaacggaaactgcaggatgccccggcacgtgtggccgagattatcgaagcgatccgggagcatgggcaggacgctttgtatcatacaggaagcatgcccggtttgaaaagctactggatttatcctctttttgcccatctggctatcggaagtaattctttccgggtgacggatgcttgtatttcctgtgggttatgtgaacggatttgtccgaccggaacgatcagcatgcaggcagggaagcctgtttggacggatacctgtgtgcagtgtgtcgcttgcattcaccgctgtccagttcgtgcgatcgaatatggaaagggaacgctgaaaaaagggcgatatcatcaccctgagattaaataataaacgaaacagataaaaatgaaacgattagtagcgacagccctggtggccctgatgttggcgagttgccaggaagcaccgaaaggttatgtgataaatggagaagtgaccggcaggacggaagggaaagtctatcttaagtccttccggaataagatgttttttgatgtcgatacggtagaattaaaagagggaaaatttacttttaagggagaagtggatcagcctttattgtttggtctggcaacagaagatatgaattatccggttcagttctttgtcgaaaatacgaatatggatgtgaggataaataatgacggcgaaacgattacggtccgtaattctcctgtcaatacaatctttcaggagaatgccgagaaggtttttgaagaagggtatgacatagacagtctgatcaccaagtatccggcttcgcctgccgccgctttttatctgtatcgttacttcacttaccagttgccgctggatgaactgaaagcgactcgtgccaagatttcttccgaactggccggttgtccgtatgtaaaagatttggatggtattatcaagcagttggaaaatgtgcagatagggaaggtggctcctgaattttcgttgccagatacggcgggagtatctgtttcgctttctgatttcagaggtaaatatgtactgttggatttctgggcatcctggtgtcctccttgtcgtcgcgagaatccgaatgtggtaaaggcgtttaatgaatataaagataaaaactttacgattgtggggatttccctggataaggataaaagtaagtggatgaaagcgattgccgacgataatctggcttggacacatctttccgatttgaaatattgggattcggaaattccggctctttacggggttcgtggtattccggccaatgtcctgctggatcctgatggagtgattgtcgctaaaaacataactggcgaggatttgcacaaaaaactgaaagaagtaatcaaataaacgatgtggaagtacggttttctgactttgttccttcttttctgtctctgtctttcggcgacagaaaagaaggatttcgaaaaagcggagcgtgaacagtgtccgtcctattacagttgccgattggcaaaaagaatggcagcggattgagtctattatccgttctatggaactttccttgccggattacgatgccgattgcaaagaaatagaagaccgtctggaccggggagaatatgtggaacatcacagcaaggttttcgaagaatcctattcgccgcattatcgtataatcagcaggcaaatatttgaaaagaagttacggcccttgctgtgaaaaaacgagtttactcttcgtcttccggatcctcgaagtcaaactcgaaatcaaatccatcgttcatcatccccagatcggtaaactgctccagttcgcgacggtctttcttggtcggacggcctaagccgcgtgcacggtctacgaatccggatatgcggttcatttccaatatttcgtattggtcgggagtagtgacgttttccagataatcaggcaccagtttggctcccatacggcgttctgttaaatcgagtaccttgaaggaaaaggtgataggtggctttcgtacctgaatcacttctccgactttgatcatacgggaaggttttacattgactccgtttatcatcaccctgtttttcttgcaagcctcggctgctatggtacgtgtcttgaatatgcgggtggcccacatccatttgtctatacggacttcattcataaactgtagacaaggaactattatttatttatttatttattattgtattggttcattgtattctgtacgccggccaggcagaagcttttgatgatttctaccgcccgttttatcttttccggcatttcctggagttcttccggtgggaacttgccaagcacatagttgatctgtcctccacgagggaaatcactgccgataccgaaacgaaggcggctgtattcttgtgtgcctaacaactgttggatgtttttcaatccgttgtgtcctgcatcgctgcctttcggtttcaggcggagtgtcccgaaagggagtgccagatcgtccactatgactaacagattctctaccggaatgttttctttctgcaaccagtagcggacggcattgccgctcaggttcatgaatgtgttcggcttcagtatgatcaactcacagttcttgatacgcatccgtgcgattgcaccgtaacgttcttccgtgaaaggaactccggcatcttctaccaatgcatttacaacgcggaatccgatgttatggcgggttcctaaatattcggaaccgatatttccaagtcctgttatcagatatttcattgttatgttgttttttagtatataacaaagggaagaatactctgttgaatattctccccttacattatttaggaataataattttattatgccttagcctgagcaccacgagcggcacgagtcaactgaacggcgcaaacaacagcgttcttggcgttcatcagttcaagaccttcgaagtgtaatgcaccaacctgcatagtcttgcctaatcccaggtgatcgacattgataaacaatttctcaggaattgctgtgtaaagggcttttactttcaactttctcatctgcaagttcagtttaccaccggctttaacaccttcggcgtgaccttccagaacaaccggaacttccattactaccggtttgttttctgacacttccaagaagtccatgtgcaggatagcgtcggttacaggctggaactggatatctttaacgatagccattgtcttcttgccgtcaatcgtcagttcaacaacaaaaatttcagggctgtaaaccaagttacgaacactgtcttttgtgatagtgaaatgagatactttttcgccgccgtacagtacagcaggaatttcgttgtttttacgcatagctttcaaagctctcttctggtctgcagaagtagcggctacttctcttgactttccttctaattgaaatgtcttcattttgttttaatttttgtgttactcaaaattagatgtttatgctttctaatttcccatcacacgtacgggggttaaaagcggtgcaaaggtacgatttatatttatatctgcaaaatcttgtctgcatgaatttttagttccataggcatgaaactgaaattccctcggcatggaacggaagtttcataggcatggaataggagtttcatcggtatgaaactaaaagtgcatgccggttcagaaccggattcctttttgccggagcaaggtttccgtatcgtcccaaagttgtttttgctgtgcatgatgccggatgcgttctgacacattcctctttttgcaattggcatagcaacaaccgtttctatctttcgcctcatccgaaagagccagatggatggcggtcgccgcgccttgggccggtgttttgataaaggggcggaacaagatatcggtaagcgggtcgaaccaggcttgcatcgtgatcatgttcgtactgacgattcccgggtccgaggcatttatggtgatgtctttgtcttgcagccgttcggcaaactcttgggtgaacaataacagcgccagtttggtattgctatagaccggaatgcggaaaaagcgtccgttccttcctttttcaaagaagtccggttcgatccggccgatggcatacgtgcaggacactgtatttacaatacggcatcctggttgcattaatggtaataactggcgggtgagcatgtagggagccacataattgacgcttacgattgtttccagcccgtcttctgttttgcgtaccggagttgtcaggatgccggcattgttcatcaagcggctgacgggacgtccttcttttaataattgaccggtgaaattgtttacggatgaaagggaagcgagatcgattcttcgcacttctatctgggtgttaccggtttcttgctggatccggttacatagggaggctgctttttccggatcgaggcaagccataatcaccggatagccttcttttgcgagggctgccgtgattacttgtcccatgcctccgtcggcaccggttatgatggctaatcctttttccattacttatattctaatttctctatttctttgacaatgcttttgggcaagttctgaatatgtttgtggcatgccatttcgatggaatacatgcgggcgatgcaatagttgctatgtccgcagtcacaacgggcatgtttgtcttccttcatcttgtttacgaatgacggatcgttcagcaaggcacgtgccatactcacgaattcgaaaccgtcgttcaagacctcgtctatcttctcgcgtgagatcagaccgcctacatagacaagtggcattttcaatgccgccctgaattttagggcatcttccaggaagtaagcctctttgaacggctcagacgggatcatgaaccgtcctgccattttgactccgagcggtagccagccgaaaggcatataatgcgtcatcgtatgaatcggcatggaaccccgcatcacatacatcggggcacggctgacgaagccaccgctaaggatcaaagcgtgtgctccgcattcgttctgcagggtacgagccacttcaagtgtctcatcaagctccattcctcctttgaagccgtcgcgcatattcatctttaccaacactgccatatcctgaccggcagctttcatcacttcgtccatgcacattttcataaagcgcatccggttttgcaagctaccgccatattcgtctttccgatgattggtatagggagaaagaaactggctgatcagatagccgtgaccggcatgtatttccactgcatccattccggcttcgcgcgccagatgaactgcttgtccgaacgcttttgccatagctgtgatttcggaaggtttcattccacggacaagggtaggggaatagatattgaaaccgctggatgcggagataggcctgcacccgcagatgtttttgtgagacatgtttccgcaatgtccgagttgtacggaggcagccgccccttctttgtggatggcatcggtgatgcgttttaatccggggatgatatctgggcgcatccagagctgacgttcgaaagaaagtccgctttgcgtaacagccgcataggccaaagtcgtcataccgatcccgccggaggcaaccgatttatggtagtcatataacatgtcggaaggcgcgtttcctgggcacatgctttcaaatgcagccgcccgtatcgtccggtttctcagggtcaacggcccgattttaccgggagtgaacagtatagattctttttccatatctattatgagttaatcattcaatatataaaaggaataacccgtttacggttttccagttcgttaccaaacatcgctttgtatttatgatagatggtgtttgcgcgaggtacaaggtttgcaaatgtccaccaagcgaaaacagctccgcttgcactccaggtcaggattgcaaatccgcaccattccacgatttcgccaaagtagttggctgatgtcacatatttgaacaggccttttttaggcagataatggttcgtgtcgccaggctttctgaggtggcggacaatatggtctgactggatattgattgccatgccggtgaagaacaagattgtcccgactataaattgagggctgtgcagccagcttttcgtatacatatcctgcggtgctaagtagaaaatccattctccctgcatataaccgttcaggaggttaaaggtgattcccataagcatgatgcctgccggcattttacttttgccttttatcaacagaggaaaaataaaagatcgttggaaataatgcagttcgaagaataagaatatcaggaacggtactgtctcgaactgtcgttccgatccgttccataacaaaaacatgacgataaaaaccggcgcttccatgcaaatccaagcaatcttgttcggtatcggaagtccccattttttatcgaacaacattccataaccggcttcgacgaaataaagggctatgaagactatggcggcgatagctgccataacaattagaaataaggtgaaatgttcagttgtcattttcgcgtgttgataatttataaccttttccgtgaacgtttattattttgatggtaggatcatcttgcaatagtttgcgtaatttggtgatataaacatccatgctgcgggcgctgaaatagttatcgcttctccatatgatctgcagggcgtgcatcctgtctaccatattgtttgcgtgttggcacagcaacgtaagcaaatcggcctctttggttgtcagcttggttgttttgccttctatggacaagatctgtttttgcaagtcgaatttgaattttccgaaaatataagtcctgacctctttcttgcgttggggctggtaacggctttgtactgctttaatccgggcttgtaagatatctgtgtcaagaggtttgcgtatcacatcgtctgcatggaacgaaaacagcaatgctatttcttctctcgtcggatgttcacacaagaaaacgacagggatgatattttccgaacttttgatcatggctgccaatgtccgtgtttctttcgtgtctatatcgtggttgataatacagagtgtgaaatttctggaaaggaatccctcatatgccgcttcttcctgatcgaatacttgtgagttgtatccaatagcttttatatagtcctggatgataactccctgattatagtctttgctgaaaatgagaatgttaaaaagatcgttcattatgttattaaattgttttttcgatgttccagacaaaagcacgtaatccttgcgcttccgtcttctgatccatctgatgaagtatctccaggaaatggtcgactttttcgtcatcgaccattgccaggattgccgagttcagtgtcggccaggcgtgacttccataatggggctcgccggtcttacttccacgtccctgtacttcgttccagtatgtgaagccccggatattgtttcggtccatcacattcaggatcatttcgtaatatgcttgattaaatgatacaaatatagctttcatattaacttattcctaattattatttattcttttttagaagatattccattttttgccatcttgcggcgtctgcgccggactccgtttccggcaaatacactgtatacgaccggtacgattaccagggtgatcaacgttgataccgaaagtccccatgctactgtcatacccatcgaacgccacatttccgagccttcgcctgttccgacagccatcgggatcatacccaatacggtagtcaaagtggtcatcaatacagggcggagacgggattttccggcagtcactactgcggtcaggattcccattcctctttcccggcagaggatcgtgtagtcgatcagcacgataccgttcttgacaacgatccccatcagcataatcaggccgatcaatgccataacgcccaatggggtctgtgtgattgccagtcccaaaattataccggtgaaggcgaaaggaatggagaacatgatgacgaacgggtctgtcagcgattcgaactgagcggccattacgataaataccaaaatgatgatcaggaccatcaggattgtcaggtcgaagaaggtgtccatctggtcttcgtatgttcctcctaactgccagctgacatccgaaggtatatccatttccttcagttgattccgggcagctgttacgatatcgctcatggctgcaccttttccgactactgccgatacggtgatgacacgttcacggtctttgcgttcaatggtcggaggcgtcattcgttctactactttacccaggtcgcggatacggattccctgaccggcattgttataaaccaggatattctcgatgtcttcaaccgactgacggaattctggtgcgtagcgtacttttatatcatactcgtcaccgtcttcgcgatatttggaagcggtagagccgttgatacggttacgcaaagccatagcagccgttgtgatattcaatccgttgatcgccagcttttcccggtcgaaatcaacttgatattcgggtatgtagtcctcacggctgatgttgacttgtgaacaaccttttaccttacgcatcctttcggccagttcggcggctacggcatcggtccggccgaaatcgaaaccataaatctcgatgttgacagcgttctgtccgcccataccttcttcctgtccgccttcgatcaccttgaaggtcttgatctccggatattttgccaggtccttacgcatctcttcacagatttcaatcataccgcgttcacgatcgccgacactcagcatattgatgtaatagtcgataatatgtgttccgttattactcaattgagcccaggtattatcggaatcggcttgtccctcggtgaagttactggtttttatttccggatatttctgtcggaacagttcgtcgatttcaagcgccagcttacgggtgatatcttggcgggttccgaccggtaactcgatgtgaacactgatctgtgcgttatcctgagtcgggaagaattccgtcttgatagttggaaccaatagcatacttcccgcaaagatcaaagtcgcaccgaatatgaccgttttccggtggcgtactgcccaataaagaaaactggaatagccacggtccagcgcatccaatgccttttcgatcggtgtgaagaacaaggtgtacaagcggccttttttaggattctgcctgagtagtagagaactcaacatcggagtcagggtcaaagcgccgactgtcgaaacgatcatgatgatactgacgatccaccccaactgtttgaacagaatacccgccatacctgtcaccattgtcaagggcaggaacacggccaacatggtcagggttgaggcgattacagagatggccacttcgtttgtagcatgtacggccgcttgtttcggggcactacctctttcgatatgggtagtaatgttttccagcaccacaatcgcgtcatccacaaccataccgatagcaatagagagtgaactcagcgagataatattcagtgtattgccggatgcaagcaagtaagcgaacgaggctatcaacgagatcggaatggtcagaataatgataaatgtcgctctccatcgtccgaggaatacgaacaccactaacataacgataatgaaggttatgaaaatggtttctttcagactgtcgattgtattcaaaatgttagtggaggtatccatgattacccctaacttgacatctgaaggaaggcttttttgaatttccggcaacttctgatgaaccttcttggctatgttcaccgagttggctcccgattgtttttggataacgatcatgccgccttttttaccgttattgtaagtctcttgggcacgctcttcgatgctgtcttcaatgcgggcaacatcacgcagatagatagtcttgttatctttatgaccgatcacaagatcgtccatctgatgcgcatccgtaaattcaccttgtacacggagcgcataggcgttggaaccgatatccacgctgccgcctggagtgttcctgttttcctgtgcgatgatagcggatattccttcgattgaaactccgtatgcttccagtttgtacggatcacaatagacttgtatttcacgtgccggcgtaccggaaatggaaaccgctcctacaccgctgatacgtgcaagcgggttcgataccttatcgtccagaatcttgtacagggcgttcgtgctctcttccgctgtaaccgaaagaatgataatcggtatatcgttcgtcccgaatttgaagataatgggattgtccacatcatccggcagcattggctcggcaacgtccagtttgtcgcgcacgtcgtttgtcgccacatcgatatccgtaccatagtcgaattctagtgtgatgatcgagatgttttcacgtgactgtgacgtgatgtgtttcaggtcgctgacactgttcagcacgttctccaacggtttggagacgttcatttcgatatccgcagcgctggcgccggcataggaggtcatgaccatgatcgtgtttgtctcgatctctggcagcaggtccactgataatctggttaatgaaaaaagaccgaagatcacgattgccacaaagacaagggcagtcgtaaccggcttttttaccgctgttgcatataagctcatagtgtttgtctcttacttttcgatttctacttccattccgttgtttaggcggctttgaccggatattacaacctggtcgccactgtttacccctgaaatgacttcatatttgtttcccatacggcgtcctaactccactttctcgtagtaaactttaccgtctttgtatacatatatatagcggtctcctgcaccggactgttttacgatggcgagatccggagcgaccacatggttttgtgttccgaaaccgatcgtcacgcgggcgaacatccccggacggacacgttcgtcattgttgtcgattttgatttcgacagggaatgtgcgtgtattcggatcgatagtcgggtaaaccaggctgacttttcctttgaaaacatcgtctccatatacatctaaccggatgtcgacatcttttcccttttttactttcgtgaaaagactttcggatacgttgatcaacagtttgaccggacgaatctgttctacggtgaagatcggcgaacctccgctatacatatcgccgctatcatagttgcgggcagtgacgataccggtgatcggactcaataactgtgtgttttcctgcaaattcttgtaggtcgcacggcttacgtctaattgtgttttctgtgcatcccaggctgatttggaagcaccgcctactttgtacagttcatcaatacgtttgaattccagttcctggttatccaattgtattttggtctgtttgaggtttgtctcatccatcttgaccaagagttgacctgcttttacatgatcgccgacttctgcaaacagtttctctatgcgcactgggttttgtggggcgatgttattcgaaatgttggcttctactgttgctgtaaattcactgatctgctccacatcttgtgcggaaacagtttctattctcacaatggctttgttgctgacggtttctgtttgtgccgaatctttcttttcccctgaacaggatagcagcaaagataaaatgaagagtgatataaagtgttgtcttttatttgtttccattttgtgatatttttattcaatgtctattttttgttttttaaaactcttgctggcctaataccttttccaagtcagcttttgctaccatatagtcgtaaatagcttggttgaaattcagtttggcctgtgtcaatgctaattccgaatcgttcatttctaacagagtcccggctcctgtgtcgtatcgtttctgtgagatcatatatccccgttcggcttgctctactcccttttgtgaagcgtcgaaacgtttgacgcaggtattcatattatctatatactgcttgattgccagttgcaggtttcgctgtgtatcctctctttgcaggctcaactgttcgatcgaatttcttgtttgtttgatcttatagaacttgctgccgccagagaaaatcggaatggagagtgaaacaccgaccatcgagtaggggttccacatatagtctttgaacttgaagtcgttgttcatggctgtccactgatatagtccagtgagcgacagtgtcggcagataatcgaacttttgcatggtcagtgtcttttccagttgcttggcttgtaaatccatctgtttcaaatctgtattattagccagggttgtgtctgtggaaagaaaatcgccgaatagatctttttcaaagtcggtcaattgtccttcacattcgatatttatgtccagatccatgcctaataatgctttcaattgccatttggcaagaactaatgcgttttctgcctgcaacatattgggttcgctgttctttacggtaacattggcgcgtatcaggtcatattcggcaacggttccctgttcgaacttatgcttgatatccaggtaattttccattgcgttgtcatagctttccttaaatacgcggtatgaatcgttggcaagaagcacgccgtaataccctttctttacctggttgaccatagcaattttggaagaacgtgcctgttcgatagccaattccacatcgacagctgagatgcttaggcttttccaaagagcggcgttgacaatcggcatagaggcgttgaaaccgagattccagttattatcacgtcctacttcgatcccttcatccatattcggcatgtcttccatgcctggtatttcggtacttcccatgtcgaagccgtccatatacatcacctgttttttcaaagttcgattatagtcggcagcaaaacttacttggggaaatagggcggcatatgaacctttctgtgcatatttttttttctggatttccttgttagccacttttacggtgggattttcgctcagcgcgatctcaagagctttctttatatcgagaacgagcgtgtcttgagcttttacggtggtgaaggccagagaggggagtaacattatcactacccacatcatctttttggtaattatgatttgtctcatttaaaataagtaaatttgatttttaataaaatcgtttgttcaatctaattgcttctgtttatatttcaacaagtaacgatctaaaatggcaatgcctttttctgtagagattccccgaaggaaggtataaagaatcgtattgaacacttcggacacggaatggttggaaagggctttggacggacggatcatttttgcctgctctttcgccagtaaagctacaatctcaaagttaatattcggttgaaaaacaccttcttttgcacctcgtgacagtagttttatacattttttcaaaaagcgggacttttcttcttccgttttttgtaatgctttcggataacgtttcagatcatcatagaacttccggttaaaccagcgaggccgtctcataagttcttcataaaaaagcaaagcgacttctaaggctgttatcggctcggattcaagtcgcttcatggatagcctcattttagtataactcaggtttatacattctgttagcagagtctccttatcttcgaagagctcataaagagtccgtttggatatactcgcgttatgagcgatatcatccatactgacattcttgatcccgtgttccgaaaataagtcgaatgccgttaacattatttgttcttttatgaccatcgattttaatgattactttttatacgatcagatattgcaaaggtctgtctaatttggaaaactaaaaaggtttattctgttacggaattagtcgaaaacgaataaaaggaacctttcttattcctgaaaaaccgttattcattggtaaaaaatgaaacatttttctgtttgttgaaaaaatgtttacctttgcaagtacacgattagtaaatatgtaaagatggaaaaacttcctttaatagaattggcggaactgaataagagtattattttccgtgatagttttcaggatattttttcgattgcggatctggacggaggtatggatatcggagatcccgactcgcctgagcgttttgctccgatgcggttaaatgcgcttttgatggtgttgacttttgaagggacacttgaaatccatctggattatgtttcttacattgtcaaaccgaacagtttcataacgatcatgcctacgcatgcactccaacttgataggatcggtaaagattttaaaggtcgcttgctgattgcgtctaaggagtttttggacgattgtaatcctggtggaggtaaccggactcaggctatagcgaactatatggagatccgtaagaatccttgtacggaactggaaccggaagaaacagcgaaactggccggtagcatgcaggttatacgggagaagatgagggaacgtactcatttttatcagaaggagttagtacagaatgcttttattggcttcttgctggacttagggaatataatgttaagcaagaaagatcgtttgatccgaccgaccctttctcgtaaagaagagctgttcgaacaattcctgcaattattgtttgagcattgtaaagagcagcatgtggttacattctatgctgaaaagttatttattacgccacaatatctgtcattgatcctgaaggagttgacgggtaaatccgctaataagtggatagatgatgccctgattgtcgaagcgaaaattcttttgaaagcgcctcaggcgactgtccagcaggtggcggatatacttcatttttccgaccagtcgacttttggaaaattctttaagaaacatatgggaatttctccgatggagtaccgtaaatcctgaagcgggtggtactccatttttctcttatcttttactgaacttataccagttgatcaattcggaaataccatagatcaagcaagcaactccgaaaatcacaaatgtgttggcggctgctccgaatgggtaggcgaggatcatgatccctgttattaaaatcagggatggtatgatataaaaaacataggaaacggtactccatttgcgggcagaaaccagtgaaatcagttgctgcgcgcctgcaagaaccagtaaagcccctaaaacatacattaatatgctaacgaaaaattgcggcatgattaccaaccatgctccgaacagaatactgcctgctccgtcgatcggaaacattggactcggctctccttctactttttcacgggtgaaataatttaagagtgagaataagccgggtatgataaaacagataccgatcgttatcaccaagtaagtaacagccgcttccggccaaagaaccaatacaagtcccaatacgatcgcaaatatgcaacgcaggactgaaccatttaaacttttcatcttatatgtattttatacttttctttaatataacaacgaagatacactattttctttggaatgaaaataaaaataaatgatacgttcttttttcaattgacaaaatgttatcgctctgctgtgaaaatctatttatcaaaaaatcagctattccactggattataatcaaaaacagtgcataaaatctcctcaaacaaggcagataaacagctccacatccccgttccggtttcacgaagatccgggtctccacctcctccacacccggatctcccatgcccttccacccgggtctgaagaaacttttcaagttgtttttggtaaaaaagtagcttgtcttcatgaaaaaacgagccttttttatctactttgtatcagctttcgaacatatcttggatttgataaaagtttggtatataatactttattgctttttgaccatgatggttatgatagatgaatgatagttgaaaataggaactgtcatggaataacatgctgttttacaagtatatgaatttaattatgatagtatgatagttgtttttttaaacaaaacttttatatagagctctgttttcgttaaatctgtttgatgtaccttttttagtttgttcatttctatgtgaagaggatcagcttccttttgctgtcaaaaggacaaaagatgtttttctctctccccttgttatatgaatgaaattatgtaactttgcagttttgaaatgcgagtgtgcaattaaaagataattaaaatattactatcgtggcagatacaaagtacatcttcgttacgggcggcgtggtctcttcattgggtaagggaattattgccgcatcattgggtaaactacttcaggcaagaggttataaagttaccattcagaaatttgatccctatatcaatatcgatccaggtacgttgaacccatacgaacatggggaatgctatgttaccgtagacggacatgaagcggatttggatctcggacactacgagcgtttcttgaatgttcagacgacccgtgcaaataatatcactacaggccgcatttatcagagcgttattaacaaagaacgtaaaggggattacctgggaaagactgtgcaggtggtgcctcatatcacggacgagatcaagcgcaatgtgaaattgctgggaaataaatacaaatttgatttcgtgatcactgaaattggaggtacggtcggtgatatcgaatctcttccgtttatcgaaagcgtgcgccagttgaaatgggaattgggaaagaattgtatatgcgtacatcttacttatgtaccttatatcgcggctgcaaaagaatacaagaccaaaccgacacagcattctgtaaaacaactgcaggagctgggtattcagccagatgttctggtattgcgtactgaacatgagttgagtgccaatttgttaagtaaagtggcccttttctgtaatgtagcacaggatgccgtcatacagtctattgatgttccgacgatttacgaagttccattggtattgcagcgccagaagatggacgaggtgatcctgcgtaaggtcggactggaagtcggaccgacaccagagatgaagccttggcatcagttcttgcaacgtaaggttgatgctactgaaactgtaaggatcggcttagtcggtaaatatgtcgaactgcaggatgcttataagtcgatcgacgaatctctgttgcaggccgctatttataatgatcgtaagttggatttgcatttgttccattctgaaaaactgaatgatggtaatgctgccgaattgttgaaagatatggacggaatcctgattgctccgggatttggacagcgtggtattgaaggaaaatttgctgcattgaaatatgctcgtgaaaacgatgtcccttgcctgggtatttgtttgggtatgcagtgcatggtgattgaatttgcccgtaatgtaatgggactggcggaagccaactcgacagaaatggaaccaaataccccatataaagtgatcgacctgatggaagagcagaagaacgtaaccaatatgggcggttctatgcgtctgggagcatacgactgtatattgaagaaagggtctaaggcttatgaagcgtatggacagacacacatccaggagcgccatcgacatcgttttgaatttaatagcgaatatcgtgataagttcgaggcagccggcatgatgtgtgtaggtgaaaatccggaatcgaacttggttgaagtcgttgagattcctgcattgaaatggtttgtgggggttcagttccatccggaatataacagcacggtcgttaatcctaatcctcttttcgttagctttgtaaaagctgcagttgaaaataaaaaataaaaattatagatggataaaaatacgataataggtttcctgcttattggagttgtcttaattgtatttacttggttgaatcagcctacgccggagcagatagaagcacagcgccggatgcaggattcgatagcccggatagaatatgcaaagcagctggaacagcagaaagaattgaatagagaagcaaaagcggacgacgaactggccggcttgcccgattctgtacggcttgcccgtttacagaacacgtttggcgttttcgccgatgcaatggttggagaggagggttccactgttttggaaaacgagctgattgaagtccgtttggccaataagggagggcgtattggatatgtccgcctgaaaaaatacgataattataaaggtgaacctttagtgcttttcgatgaaaaggactcgaagttcgattttacattggttacggctgataatcgcgtggtaaataccggtgatttgtattttacccctgtaaaaggaaatgacgggaacagtattaccatgcgtctgaatacgggtgaaggcagccatctggattttatgtataccttaaaaccggatgattatatgttgcagttctccattaagggaaccggcctgaatggtgtactgtcgccaggtacgactgcattggacttgttgtggcaacaaaaaataatccagcaggaaaaggggcgtaagtttgaagaccgttatgcaacggtatattataaatttatggccgacgatgtggagtacctgagcgaaaccaagaacgacagcaaacaattgtctaaccggttgaaatgggtcgcttataaggacatgtatttttcttctatcctgatcgccggaaacgaaggattcgagtcgacaactatcgattcgaagatgttgcctgaagacggttctttcctgaaagagtataagacgatgacttccgtacctttcgacttgaagggtaacgaagcgacggatatgcgtttctattttggtcccaatcagttctctctgttgaaatcttacgatgatgatgtagagaaagccgaccaactggatctggaaaagatcgttccgctgggatggggtattttccgttgggtgaaccagtatttcgtcattccgttgtttaatttcctcggacaatttattcatagctacggcttgttgatcttcctgctgacggttatcgtaaaattgatcctgtttccgttgacgtataagtcttatatgtcatcggccaaaatgcgtgtattgcgcccgcaggtagaagagctcaatgctaaatacccgggacaggataaggcggtagagcgtcagcgtgcgatcatggaactgtatagccgtgccggagcgagtccgatggcaggatgtgttccgatgttgttacagatgccgatcctggtcgctctgttcatgttctttccgtcggctatagaattgcgtcaccagagtttcctttgggcacacgacttgtctacttatgatgcgattgtaagctggaatacatatattcctattattacaccgtacttcggaaatcatatcagtttgttctgtttgttgatgaccgtaacgaacatcatatatacgaagttcaatatggatcagacgaacactggacagcagcagatgccgggaatgaaggcgatgatgtacatgatgccgctgatgatgttggtattcttcaatcagtatgcatccggtttgacctactattacttcatctccacattgatcacgattttgcagactgtaattttccgttatacgattaacgaagataagctgttggccaagttggaagaaaacaagaaaaagccgatgaagaagtctggtttcatgaaacgtttggaagaagcccagaaagctcaacaggcccagttggaaagacagaaacaacagcgggagaataaccgtcgccgttgagaagtcgaatctgatgggataaaaagaatgccggttgctttggagagcaaccggcattcctttttatgcggatgccgattcattagtcggttgatactccctatttttcaagaaggccaatgccttttccatatcctctggcgtgtcgataccgattgtttcctgttgggtaattccaacttttatcttgtagccgttttctagccagcgcagttgttccaggctttcagccagttccagaggggattggggtaaatgggtaatttctttgagtgtgtcggcgcggtaagcatatagcccgatatgtttgtaataggtatggttcggcagccattcggtatatttcctgcctctcatgtaaggaatgatcgaacggctaaagtacatagcttcattcttcttgttcaaaactactttcggtgaattggcgttgaataaggtcgtttcgaaatcatcatccgggcgaaatggttttaccagggtggcgatttggatgctgtcatcgatgaaacatgcttttagtatttcgatctgttccggttggataaaaggttcgtcgccttgtatgttaacaaccacatcgtatccatctccgattttacaatacgcttcataacaacgatccgtaccgcttttgtgttggtcggatgtcatgatgacattgccgccgaaagcttggacggctgcttctatacggttatcgtccgtagctacgcaaactgaatcaagcacattttggacttgttcgtatacccgttggatcatcggcttgcctgccaaatcggcaagtggcttccccggaaagcgggtagaggcgtagcgtgcaggaattattcctataaacttcatgatctatgaattataatttatgatttatgaaattatcaattgttcaccgtttttccttcgcttaactgaacgactttttcatgttctccaacaatccatacaatatccccctcttcaaaaacagttgaaggagatgggtttttgatggaagaggaacctcgttcgataccgatgaccagacaggcagacctgtcccgtatgcctgattccagaattgtacgcccgatcagatgggatccttcggcgatggtgaattgttccatattgacttcatgcgtcgtctgctccttgtcggtttgggcctttttatatcgctcgaccagatattggcggaaatgttcaagatcgacatctgcaccgactactaccaatttgtcaaatggatagagacgttcttctcctccgggaatattaatccgctgttctccccgaatgatcgttacgatgttgacattgcatttctggcggaagttgagttccttcaaggtttttcccatgctgggggagttctgctttacttcaaaatcggctaaatgaaggtcgcgttccaacaggtggttggcaaaccgttggttgatcggagctttccgctcgttctccaattcacgtgcggagaggttactgaaaaaatgtcgttccatcaggatggattgtcttttcagccgtttggataaaatgacaataacgatgacggttgctgcgatcgccagtacgataccgactgtagcattcaacaaacgggcgacgggcagcatgactaggccgatacataatatgatacgcaaaatgaccaatgaaaccaatggtccccggttgtacttgctgtccagccataattgttggaattcggcggaatggttcttcttcatcatgatcgcacgcagcatgggagctattagtagtaggatcagaacgagcgagatacccgctccccgtatgcccggaagttctttcatgataaaaggagctatgaactgaagccagataaagatcaggacaagggtaacggctgtataagtgccgactatgcggatcagcgccttcaacagtttattccaggcgcttttctgatgtatggtattggaaccggaagaataacgttcgagaaatttcatccatgacttcggtatgatccggtcggcaacccggcatgcaggttctgccatacgaatcatgtaaggcgtaaagaaagtcgtgacaactgaaaccgctacgacaataggatagaggaaattatcggttacccctaatgacagccccaacgatgcaatgataaaagcaaattcgcctatttgagcgagagaaaaaccagattgtatggcgatcttgaccggttgtccagaaagcaagaccccgaagctggcaaataatatttgtccggtcattacgaccaacgtgagaatcaggatcggaattttgtattcccacagcaatgccggatcgatcaacatcccgacagagacaaagaatatggctccaaaaagatcttttactggtttgataatatgttcgatatgttccgcatcaatggtttctgccaagatagatcccatgacgaaagctcccaaagcggaagaaaaaccagctttcgtggcaatgataaccattccgaggcataatcccaggctgacgatcaacaaggtctcgtcattcaggaaagtcctggctttttttagaaaagagggaattagataaatgccgataacaaaacagaaaagcaaaaagactcccagtttgatcacactgttgagcagttccattccctctacgtgtttactgactgccaatgtagacagtaaaaccattagtaaaacggcaaacagatcttcgacaacaaggattccgaagaccactccggcaaacctctgattgcgtagtcccatatcgtcgaacgctttgaaaataatggttgtagacgacatggaaagcattcctccgaggaaaaggctgttcatatgtccccaacctaaagataatccggtagtatagccaagtgtcatcatgcctatcacgatggtaatagctccgatcactgctgttccgccgactttcatcagctttttgaaactaaagtcgagtcctaaagcgaataagaggaagattacgcctatatcagcccagatacggatactttctatattcgtgacagtcggtatttgcgtgatagacggaccggcaagaattccggctacgatatatccgagtacgaccggttgctttaaccatttgaaaagcaaggtgaccaatcccgctgaaatcagtatgacagcaagatccgatataagagaaggtatttgagacatgctttcattgttttttctgttggcaaagttatgtatttattttaattttgccgatctaaaaaattgccaaaatgaagaagatgcatccgatagaagcgttgatagagcagggggaacaccaacaacttgattttaaattcgaagtgagcgacagtaagaagattgcgcgtacgctgagtgcttttgccaataccgacggtggacgtctcctgatcggtgtgaaagataacgggaatatctccggtgtccgaagcgaagaagaatattatatgattgaagcggcctccaagatgtatacccgcccggaagtcccctttgaggcgacacgctgggaggtgaacggcaaaacggttcttgaggtgtacatcgcccccagtccggataaaccgcataccgctcccgataaggatgataagtttaaagcctacataagggtcgccgatgaaaatattttggcaaatgaagtgttggtgcttgcctggcagaaaaagcataaaccggacgggactttattgaagataagcaaacctgtggaacgtttgtttgcttatctggatgatcatccccatatcaatatcagccagttttgccggatcgggcggatcaattattataccgcgaaaaacattctgagcgatctcctggccatgaacaccttgcaataccttgtaatagacaagcatatcttatatcaacgcgtccctgcgtagaaagtgccaaaacggccgtgtcttaaaggttttccacatacacttgtgcattctcaaaacggataactttgactttgccccctttctctataaagcctgattcggaaatcccgtcataaaatactccgtcgaccgacactttcccggaaggacgcaatacggttgcggctgtaccttctttcccgactaacgaagataaatcaggggatgatatcgcattttccaaatctgtatttagcgcgactttccggaacattccccggtgtccgattttattggacagccagatcatcaggctgaagcctgtcactaatccgaccaggactgtcaatgttgctttcccgatctcttttccgctgactccttcgaaatcgaaatgatcgttgttcagtaagcccatgactaggccgccgataatcaatatgataccgctaattccggcaaccccgaatcccggaatgatgaagatttccactgcgagcaatagaatgccgatgataaaaaccagaatctcccagtttgccgccagcccatctatatagagtggtgcaaagtagaggattgccgccagcagggaggccgcagaagggaagcccagtcctggcgtttgcatttcaaaataaataccgccgatgataataatgatcagaatagactgaaaaataggattcatcaaaaatccttttaaatcgtcctgccaactagggatataacttttcattttgtaatctttatatcccaaatattgcgtgattacttcatccggattttctgctataccgtcgcaatatccccacttttgagcctcctgtgctgtgaaagtaaggacttttcctgtgtctatcagatttggaatggcaacccgttcgtctaccatcgcttcggctatcaacgggtctcgtttccatttgtataaggtgtcgtttttttggacgattgtatcttgtccatgcgcttcggctgtcgaacgcatcatggaacgcatataggattggtatttgtctggcattgcttcccctgttgggttcacgacggtggctgccccgatatttgcacctttccgcatataaatttttttacatgcgatggaaatgagcgccccagcagaagccgcattgttgtcgatgaagacatagacagggatggggttgtacaaaatagccgtacgcatcgagtctgcagcatctacctggccgccgtatgtgttcatatggatcaggacggcgtctgcacccaaagcgtaggcttccgctaaaccattgctaagatacaggcgtgtggtgttgcttatctctttttttatatcgattttatatattagcgggtgcaaggtgtctgccgctgatataaatggagctatctgaaccaatatgatagctaaaaaaagtcctaaatttttcttcattttatattattctccatctcttttacatgttgtacgaatttgtaacatacatgttgtgaattttgtattttagttgttgcaaaacttgtaaatactgctcattttcaatactgtttgttataaatgtattaagttacgatttttaatattaataatcatcaaaccgcattgtatttaaaatattattcctacatttgtaatgtccttcaatggtgaaggataatgccaaaccggtattaaacatataaaaaaataagtaatatgaatgcgttgcaatttcagaaaaaattattgagcatgcaagaaaacatgatgaattttgcattaatgctcaccgcaaatcgggatgacgcccaggatttgatgcaagacacaacgctgaaagttttggacaatcaggaaaagtttgtagataatattaatttcaaaggatgggtcttaactgtgatgcgtaatatcttcataaataactaccataaaatcgttcgtacacagactgtcgttgaccagggtgtcgacctgtataatctggatgtagtgaatgactcaggttttgattctcctgacggtgcttatcaaatcaaagagataacaaaagcgataaacagcctgaacgatgagttgaaaatcccgttctccatgtttttgagtggttacaagtataatgaaattgcagagaagctatgtgtacctctgggaacggttaaaagccgtatcttcttcgctcgtcaggaattgcagaaagtcttgaaagattttcatcgaagttgaggtgaagtttaaaataaatatgtgaaaaaataaacgggagtatccaaggggtgctcccgtttatttttattacttttggctcaaaattttaaacggaaatgagaagttttgcaagtgataacaattcgggtgttcatcctttggtgatggatgccgtgataaaggcgaacgataaccatgctgtaggatatggtgacgatccctggacagcagcagctactgcgaaaattaaagaagtgtttggcgaaatggcatcgcctttttttgtttttaacggaacaggggcgaatactgtagctttgcaggctgtgacacgtccgttcaatagtattttgtgcgctgaaacagctcatatcaatgtggacgagtgtggtgctcctgcccgtatgactggttgtgctatcgtgacgattccggctccggacggaaaactgacgccggaattgatcaaacctcgtctgcataatttcggtgtctgccatcattcgcaaccgaaagctgtttatatttcacaggtttccgagttggggacgatttatacgatcgaggaggtcaaagcgattgctgatctgttgcattcttataacatgtatctgcatatggacggtgcacgtttggcgaatgcctgtgcttatctgaattgttcgatgcgggaggtgaccgtcgatgccggggtggatatcctgagtttcgggggaactaagaatgggatgatgatgggagaggctgtggtttctttccgtcctgagataactgagaatttgcagtatttcagaaagcaatctgctcaattggcttccaaactgcgttatctttcctgtcagtttattccttatctggaaaatgacctgtggttggaaaacgcacggaaagcaaatagtagtgcttatcgcttggctgaagctttgaaaaaatatccgcagatacggtttacccagaaagtagaatccaaccagcttttctttaccattcccacggaaccgctgaagaagttgcaagaaaaatatttcttctatatgtggaatgaggaaatcaatgaagcccgatttgtcacttcgtgggacacgacggaagaggatattgacgatatgatacggacgttggacgtcgtgtttggttgacggctacccctatgagtttcctgatgaggatttatcttgccggactcatggaaagttgttacttttgtggcctaatctataaatccggcgataaaatgaaacaggcggtttggttggcggcggcattgatgatgttgttgccattgggaaaagtctactcgaaggagagaagcgagcgcgagaataatacgttgcgcattatgagttataacatccgtaacggtagaggaatggacgatgtgaccgactttcggcgtacggcggcagtgatcaataaagtttgtcccgatgtcgtggcagtacaggagatcgacagtgtgacaggccgtagtggaggaaaagacgtcttgcgggaaattgccggactcaccctgatgcattatatgtatgccccggcaattgattacgatggagggaaatatggtatcggcatgttgagcaaggagaagcctcttggctatcgttatctgcccctgcctggaagggaagaagcccgtgcgctgcttgtcgtagaatttgaaaagtatatttattgctgtacgcacctttcgctgaccgaggaagaccggatgctttccttgccggtcatcaggcaggtggcggcttcggcaaacaagcctttctttatagccggcgatatgaatgcgcatcccggttcggagtttatccggcaactgcagaacgattttgtgatcctgacggatacgaagatgccgactttcccggctgatagacctgacgaaactattgactatattgctgtctatgcgaaagatacgactgcctttacccgcatctcatcccgtgtatgggatgagccggccgcttccgaccaccgcccaatcatcacggatattatcttcaatcagcctgcgggcaagatattccgtacggagccctatctgcaaaatcctgtaggaaatggaattacggtcatgtggcagactaccgtcccgacttatagctgggtggaatacggaaccgataaggagcacctgcagaaggctcgtacgatcgtggatgggcaggtgatctgcaacaatctgcaaaataaaatcagactggacggactggaaccgggaaaaacctattattaccgggtttgttcgcaggaaatcatgctctatcaggcttataagaaagtgtttggagaaacagccgtttctgattttcatacttttactttgcctactacgacggacaccgattttacggccattatattcaacgacctgcataaacattccgagactttgcaggcactgtataagcaggtgaaggatttgaaatatgattttgtcgttttcaatggtgactgcatcgatgatccggccaatcatgacgaggctacctgtttcctcagtgaactgaacgaaacggtcggagccgaccgggtgcctgtcttctatatccgtggcaaccatgagatacgcaatgcctattcgatcggcctgcgcagtcttttcgactatgtgggcgataaaacctacggcgctttcaactggggcgatacgcgtatcgtcatgttggattgcggtgaagacaaaccggatacgcattgggtctattatgggctgaatgatttttcagacctgcgtaaggcacaggcgggtttcctcaaggaagagttggcgtccagagccttcaagaaagcctctaagcgggtgctgatccatcatgttcccatctttgggaaaggagaggactatgattcgtataatccttgccgggacgagtggggagcgatccttgagaaagcaccgttcgctgtcagtatcaatgcgcatactcatcgtttcgcttatatccctgaaggtgctgacggaaacaactatcctgtcgtagtgggtggcggttaccggatggatggagctacggtgatgattttgcagaagaaaggaaaggagatgactcttcgtgtgctgaatgctaaaggagaaacattaaaagaactgaatttataatagacgaatagtaaagatatgaaactaaacctggaagagcaggaagaaacgattgaaccggtcgaaaagaccgatctgatttatggtatagacgaccgtcccccttttaaggaagccctgtttgccgctttacaacatttgctggcgatctttgtggcgatcattacgcccccgttgattattgccggagccttgaagctggatctcgaaacaaccggttttctggtttcgatggcactctttgcatctggcgtctcgacattcatacagtgtcgccggattggtccggtaggggcgaagttgctttgtatccaaggaacgagtttttctttcatcggtccgatcataacggccggactggcaggaggattgccccttatattcggggcgtgtattgcggcagccccgatcgagatggtaatcagccggacattcaagtatatgcgttctatcataactccactggtatcgggcatcgtggtgctgctgatcggacttagcttgatcaaggttggagtcgtttcatgtggcggcggctatggtgcgatggataacgggacgttcgggagcatccggaatataggggtggcggcgacagtgttgctgagtgtcctgttctttaaccgttgcaagaacaagtatcttcgtatgagttcgatcgtattggggttgtgcatcggttatgcgctggcctactttctcggtatggtcgatatggcggcggcttcttcgcaaagcctgatgggattcaatatcccgatgcctttcaaatatgggttggacctgaatttctccgcctttgtcgctattggcctggtgtatctgattacggcgatcgaagctaccggcgatgtgacggccaactcgatgatctcaggaaagtcaatagaaggagaggactatctgaagcgtgtttcgggcggcgtgctggcggatggggtgaactcctttattgccgggattttcaactctttcccaaattcgatctttgcgcagaataacggtattatccagctgacgggagttgccagccggtatgtcggatattatatcgccggtatgttggtgctgttagggctgttccctgttgtcggtgttgtcttttccttgatgcctgacccggtgttgggtggggcgaccttattgatgttcggtacggttgcggctgccggcatacgaattatcgcttcgcaggaaatcaatcggaaggctactttggttttggcggtcagcctctcgcttggcttgggtgtggagctgatgccggatatcctgaatacggcgccggaagctgtaaagggtattttttcgtccgggatcacaaccggtggacttgccgctattattgcaaatgtattgatacgagtcaaagaagataaaacagaataaaaatggaattactaaaacaacgtattctgcaggatggcagatgttttccgggagggattttaaaggttgacagctttattaaccatcagatggatcccatgttgctttataaggtggcagaagaatttatttaccgtttccgggatgcggatatcaataagatcgtgacgatagaagcaagtggtatcgctccggcgattatggtgggatacatcatgcatctgcctgtcgtttttatcaagaaaaaacaaccgaagacaatggagaatatgttgtctaccgttgtccactcgtttacgaaagaccgcgattacacggtgtgtatcagtaacaactttctgactgccgatgaccgtatcctctttattgacgactttctggcgtatggcaatgccgcaatgggcgtgctcgacctggtgaaacagtctggcgccaagctggaaggaatgggctttatcatcgaaaaagcattccagaagggacgcgatgtgctgaacgaagcggacgtgcgtgtagaaagccttgccattatcgacagcctggaaaactgcacgatcaccatccgctaatgatttaagccgttgggagattacggcagcgtgaaacgcatgcatgccgtattcttcatgatcggtaaactcagtatcttttcaggaggcagtttctccagctgcacgatgatggcacggttgaagcctccatgcccgatcgccaggatccgctttcccggaaactcctttttcaggaagtcgacaaaatctcccgctcttttgtatagggcttctatggtctctacgctttccggcagtgtcgtaaaatccatctcatccgctactttcccggtatatatgccccaatccatttcgcgaagaagaggagtcgccaccggctgcaatcctttctgccgggcgacggccattgctgtgtcgtagctacgtgcgaggtcgctgcacacgatcacgtccaactcctccttgtccagcgtttctgctaatgctttggcctgctgtttgcccagttccgacagatggccggggagctggccttgcataatatgcaatttgttttcttccgtctcgccgtggcggctcaggatcaattctatctggctcatatctgtttttttatttggcggtaaaggtaaataaaaaaagagaaccaattgcttgattctctttttactggttgcggaggcaagactcgaacttacgacctttgggttatgagcccaacgagctaccactgctccactccgcgatatagttgcgatcattcccgattgcgagtgcaaaggtacaaaaatattcttacaatccaaatttatttacaaatagtttgtgaaatattcttgtaccccggttctccggccttaagaaacagcattttgacagcttataaatcttctatcgaatcatgattttctgtttcgtatagcttcagtttgcttttcaaccgattcacctcctgttgcagagattctacccggcccagcaaatgatggatggcgtcgatcccctctatgttgatagacaagtcgtaatacatacgagtatatcgttctacgtcatacaattgggaggcgggaaggtagctttccccttctaccgtgtctatctctatcaggccgcctttttgtaataggtagagaaacgatggttcgatatggcatatccggcaatattcactgactatgattaaatctgtttgcataacaatctcgttttttaattaagactttgtatttcgcggaacaattctttttgtttgtccgtcaggttggtcgggatgtcgatggagtaggtcactatcatatcgccgaactttccttcttccttataaacagggaatccttttcctctcaaccgtacctttgtgttgttttgggttcccggtttgactttgagcttggctttactgtccattgtctcgacaatctgttcgccgccgaggattgccgtatataggtttaaaggaacagtgacgtacaagtcatcgcccactcgtttgaaccggctgtcttccgggatatggaaggtgatatacaaatcgcctgccggcccgccatttacacccggtccgccctgtcctctcagcttgatggtctgtccgtcggcgataccagccgggatggtgatacgcaggtttttgccgtttacggtgatgatctgcttgtgtgtcttggcagcatctgtcaaagagacctgcaattctgtcgtgtagtcttgtccgcggaaaccgtggctgtgtctgcctctgccacccatgccgccgaacatctgttcgaagaagtcggagaattcgctgccgtcgccggagctgctccagtaggctcctccgccttgcccgttttgatattggcgatattgctgctgttgggcttcgaactcgtcggcgtgtttccagttttctccatactggtcatatttcttccgtttctccgggtcgctgagcacctcattggcttcatttatttcctgaaacttgcggtgagcgtccggatcattcgggttcaagtcgggatggtatttccgcgcaagctttttgtacgcctttttgacgtcgtcctgcgaagcgcttttgtctactcccaaaattttgtaataatctatataggccatatttatatatgttattaagtctgcttctttttctgaatttaatgcatatatagaataacaacaaatgtgccaaagagttcatgccggacttagcgcctgtttaaattttgttcgacactgttttgctgtttgtttccgaggctatttatctgttttctttatcgatgacaacacaaaggtagagccccacggcaggcaggaatacgctttcgggaatatcggcgaatatcggtgaagataggtgcagaaataggtagaatataaatgctattatattttgaatatcagcaattattgcttatctttatagggcaataaaacaatgggattatgatgctgaatgaattcgaagtcaggagttacgggtggcaggaattggcggtcctttacggtccggatttgatgccggcatcggctggcaaacggttgtccaaatgggtgggggtcaatccggagctaaaggcggagctgcaaggtaacggttggaggaaggggaagaagatgttgactcccctacaggtgaggacaatcgtgcaatatctgggtgaaccttgaaacaagggacttctgtgtgcgaagtaagggacttcggcgtgtcaaaccacgaagttcgggaggtaaaagaccggacttccggatgcgaaagaagggatttttctcgtaccagtcgtatctttgcctatgccggtttaaaaaaaaggtgcaaggaaatacggaaataagcctatatatatatattaatatatttattttaagatgtaggattgaaccacaagtgacggaaaacctctgtaaggcgcttgtaatgaatggtttatattgtgctattgactgcaccgtttttatttgagatgaaatgtcggatgtagagcctgttgctatttccttcaataacagtcttatagcagtcaatttgaccgtttcccccggttccggatcgaatgtttgttcacggaagctccataggaaaataaacagaggtttttttaatgggactaataaattgggggaggagctgaaaaagaaaaaccttcgatcctgaagaaccgaaggtttactgagttgcggaggcaagactcgaacttacgacctttgggttatgagcccaacgagctaccactgctccactccgcgatgtagttgtgatcatttctgatttcgagtgcaaaggtacgacttatttttgataaaacaaattttccggcagttttcttcatcttagggttaatagatatagtttggaataactatccggaaatcagctctgctcttttagagaacgattggttcatatctctattataaaggtttgtttggataaaatgtaagtatgtttttggtagttattattttttccggtacttttgcgcacagttttaatcaaaatgtgcaatacaaatgccgatgacagtttctaagacacgtgagatgttggtggatgtggccagacaattgtttgcccgcatgggggtggataatacgacaatgaacgatattgcacaggcatccaaaaagggaaggcggacgctttacacatactttaaaagtaaaaacgagatttatctggcagtagtcgagtccgagttggaccaactgtacaagatgctgcaggatgtagcagcgaaagacttgccggcggacgaaaagttgatgacatttctttatgcaagattggatgcaatcaaggcgctggtgttccgtaacgggacattgaaagctaatttttttcgtgacatttggcgggtggagaagatcaggaaaaacttcgatatccgtgagacggaattgatacagggaattctggaagctggagtgaaggaaggaattttcgcgatgcccgataccgagattacggcggtcgttcttcatcatgccctgaaggggttggaagttccgtatatacgtggaatcatgggggataatatcagccagcggattaaacggagagataatgtaatgaatttgatattcaatggtataaagataaagtaacacaatactgaggaatgtttattaatgcaacagggttttatgtacctgaagaacgggtagataaccaacattttttagagttaaacgggctaaccagcgagtggattgaacagcgcaccgggattcgttcccggtctaaggcaaaagccgaggaaaatattaatacgatgagtatggaggctgttcgtaacgccctgcctaaattgccgtatgatattacggatgtagatttgattgtttccgcctcttattctccgtacgatacggtagcgactgcggctcatcttgcccagcatgaattccatattgaaaatgcgaaagcgctctatctttcttccgcctgctcctcattcctgaatgcgttggaagttgtggaagggtattttgctatgggaaaagcaacaaaagcgttgatcctttccgccgacaagaattcggcctactataatgagacggatccgaaagccggccacctttggggcgatgcggctgcggccttcttcatctcgaaggaacgcgtttcggaaaaggattccgagatcgtggaagtatacacacaaggacttggttatctgggcaaggctccggatgcggtacatcttcgtccgtgcgacgggggaatcatgatgccggaaggacgcgacgtctttatccaagcttgtacctatatgccgaagaacgtgctctatctcttggaaaagaatggctatacgttggacaacctgacatatttcatcggccatcaagccaatatgcgtatcatgtccaatattgccaaacagctcaatctgccggaagagaaattcctgcataatattgaagaattgggaaataccggttcggtaagctcagcattggtatatgcccaaaatgatcatagtttcaagaaaggcgacctggttgccattaccgtgttcggcggtggctattctacgggggcttgcttgattaagtgttgaatttaaaacggaattaatatgaaattattagaaggtaaagtggcaatcgttacgggggccgcacgtggtattggtaaggcgatcgcattgaaattcgccgcagagggtgcaaatatcgcattcacggatttggtgatcgacgaaaacggtctggccacccagaaggaaatcgaagcattgggtgttaaagcaaaaggctatgcttccaatgcggccaatttcgaagaaacacacaatgtcgttgctgaaatcgtaaaagatttcggtcgtgtggatatcctcgtaaacaatgctggtatcacgaaagacggtctgatgatgcgtatgagtgaaggtcagtgggatgccgtcatcggtgtcaacctgaaatcggctttcaactttatccacgcttgtactccggtgatgatgaaacagcgttcgggcagtatcatcaatatggcttctgtggttggtgtacatggtaatgcaggtcagagtaactattcggcatccaaagccggtatgatcggcctggctaagtctatcgcgcaggaactgggttcacgcggtatccgtgccaatgcaatcgccccgggcttcattattactgatatgacagccggtctgccggaagaagtcaaggtcgaatgggcaaagaagattcctttgcgccgtggcggtacgcctgaagatgtggccaacatcgctacattcctggcttccgatatgtcttcttatgtatcaggacaggtgatccaggttgatggcggtatgaatatgtaaagagatttatgatttataatttatgatttatgtaggtgacgtttgttttgcaaaatcataaatccataaatcataaatcataaatttgaaatcatggaggttatttacgaagacaatcatatcattgcggtaaataagacttgccgcgagattgtacaaggagataaaaccggtgatactcctctttcggacatgctgaaggcatggctgaaagagaagtattgtaaacccggaaatgtctttgtcggcgttacgcatcgtctggatcgtccggtcagtggcgtcgtgttatttgccaagacgagcaaggcgctcgcccgtctgaacgagatgttccgggtcggcgaagtaaagaagacctattgggcgatcgtgaagaactgtccgccggcagaagagggagagctggtgaactggctggttcgcaacgagaagcaaaataagagctatgcttatgacacggaacggacgaatgccaagaaagcggtcctgcattataaagtgattgctcgctcggacaactattatctgttggctatagacctgaagacaggccgtcatcaccaaatccgttgccagcttgccaagatgggatgcccaatcaaaggcgacttgaaatacggttttccccgttctaatccggacggcggcatcagcctgcattcccgcagtgccgaattcatccatcccgtatcgaaacagccggtcagcattgtcgctcctgtgcctgctgattctctttggaaagcgatggagcagatgaagaggtgaaagttgttctgactttcagccgatttattaaccggatgcgaagcctctctttcatctttcaccttttagctgttttagctgttcttttgatttgcttcgtgtcacgatataaacccctaagaatactaatgcgatcgcgatacttttcatcagtccgaacgtgtccaggccgactatgactgtgatgatggatgcgatgatcggttggacataattgtacatggtcgcaaccgttgggcgtagaatccgttggccgatcgggacgagaaggtaggcgaagaacgttcctcccaatacgacaaccgcgatgttcaggtagatatccaggggcagggtggcgaagtcgatgcttacgacactgttgtaggagaaagggatcgtacagattgccgagtaggtgaacatccatttcatcagcgtcacgggcgagtaccgtccgatcaatcctttgtagacaactacataaatagaaaaactgcattgtgcgatcaggcagaggatatctccccacacgttattgctgccgtttcctgttaccgccgtttgctgtccgctcagaataagcgtcagggcacctgccgccccgacaaagataccgaggatcttcgttcccgtaatcggttccttcaggtaaaaagcagcgatgatcatggtgatgatgggggtggaggtggcaacgatcgttgcgtctatgggtgaagtctgcgacacgccaaagatataagtaccttggttgaatacgattccgaagagggctgcgaaaaacaggtgtttcaggtcttcatgagggacgtgttccttgcgggtaaagatcgatgcgatccagaatactattgccgcacccaacatccggaaagttgttagtgagattgcatttattaatccgctggataagacaatcttggaagagggagacatgcatccccacaatacgtttgccatcagcatagccaaatgtcctttgtaagcttctgatttcatgataacctgtttgttttgggggtacaaaagtagaaaatctgccaaatctgccaaaaaaggtccgccagattttgtgttttgttcggtttgtaggcgacaggatttatgcagacaggcatccgtttttgagatggatgcctatgcaattcgatctctttcctgggaatataggatagtttcgcataatagttttatctttgtatgtagtagaaacaataatggtaagattcttatgaaaccgactcgtattatcgaaatttgtgcaaactccgcacaaagctgtgtggaagcagaagccggaggtgcaaaacgtgtggaactttgtgccggcatcccggaagggggaacgacacccagctacggggagatccggacggcgcaggcactcacttcgtctattgatataaatgtgattatccgtccgcgtggaggcgacttcctctatacgccggcagagattcagtcgatgttgctggatatcgaactgtgcaagcagttgaaggtgcacggcgtagtctttggttgcttgacgaaagacggggatatcgatgtccctttgatgcgccggttgatcgagacggccaaaccgttgtctgtcacctgtcatcgcgcctttgatgtttgccgcgatccctttgccgcattggagcagttgattgagttgggctgcgaccgtatcctgacttccggccagcagtccgatgccgtgaaagggattcctctcattgccgaactggtgaaacgtgcggcaggccgcatcatcatcatgccggggtgcggagttcgggagaataacatcgcccgcatcgaagcggaaaccggggcgaaggagtttcatacatccgctcgaagcatcgtctacagcaagatggaatatcggaacgagaatgtcccgatgggcagcagcatcgtttcctccgagttcgagacggtcgaaacggaccgcaagaaggtggcttcttacctgtaaaagaaccaagtttatggcaaggctgcgaaagcaactttgtttttgaaacgagtaaacaataaaaaaagaaagaacaatggaagaacctaaaagactttaccgttcgaataacgggatgatagcaggtgtttgtgcgggtattgccgattatttcggctgggatcctacattagtgcgtatcggatatatattattgagtatctttacggtattttccggggtgatcgcttacctgatcctttggatggttatacctaaacaacctataaataaaggatgaactttgaattatcttccccattcagtccgacaggagatcagccggaagcgattgcggccctgtccgacggtataaagagtggtgtgcctttccagaccttgttgggagtgacagggtccggaaagactttcactatcgccaatgtgatcaaggaagtgcggaagccgactttgatcctgagtcataacaaaaccctcgcagcccagttatacagcgagtttaaggcattttttccgaacaatgccgtcgagtatttcgtctcttattatgactattaccagccggaggcttacctgccgacgacggacacctacatagaaaaggatttgcagatcaacgacgagatcgataaactacgtctgcgtgcaaccgcttcactgttgtcggggcggaaggacgttattgtcgtttcgtctgtctcctgcctgtatggtatggcggacccgacagcctttgctgagaaagtggtgcatctggagaaggggatgcggatagacagggataaactgctgcgccgtttcgtggatgccctttatgtcaataataagatagagttcaacagggggtgctttcgtgtaaacggggatacggtcgatatctttccggctatcgaaacttttgatggggcagcctaccgtattgagttctgggacgatgaggtggatcgcatttcttcgttcgacccgcagaccgggcaggagatagacgagcaggatgaactgaacatttatccgaccaaccttttcgtgaccacccaggaacgtatcaataccgctatcgggcagatcgatgtcgatctggggacgcaggtgaatttcttgcgggaaatcggcaagccttacgaggcgaaacgtttgtacgagcgtgtcacgtttgatctggaaatgatacgcgagctggggcattgctccggtatcgagaactattcccgctattttgacggtcgccaggcgggtgaacggcctttctgtttgctcgattatttcccgaaagactttctgttggtggttgacgagagccacgtgacgatcccgcagatacgggcgatgtacggaggcgattattcccgtaagaagaatctggtggattatggtttccgtctgccggcagcgatggataaccgtccgttgacgttcgatgagttcgagtcgctgactccgttggcgatttacgtgagtgcgacaccggccgactatgaactggaaaagagcgaagggatcgtggtggaccaagtgatccgtccgacaggcttgctcgatccggttatcgaggtgcgtccgacgttgaaccagatcgacgatctgatggaggagatcacacaacgtgctgctgtggacgaacgtgttttggtgacgacattgacgaagcgtatggcggaggaactgactgcttatctgacgcgcatgggaatccgctgcaactatatccatagcgatgtcgatacgttggaacgcattcagatcatggatgatttgcggaaagggttgttcgacgtgctgatcggcgtcaacttgctgcgtgaaggacttgatttgccggaagtctctttggtcgctatcttggatgccgataaggaaggtttcctgcgctcgcatcgttcgctgacgcagacggctggacgtgctgcccgaaatgtgaatgggaaggtgatattctatgctgacaagataacggacagtatgcgcctgacaatggacgaaacggcccgtaggcgtgaaaaacagctcgcttataacgagaaacatggcattacgcctaagcaggttatcaaaaacagcgtttccctggttgcggagaaacaacaaccggttacaggcgaaccgtatgcttatgtggaaccggaacccagcttggttgcagacccggtagttcagtatatgaatcgcaaacagcttgagaaagcgatcgaacggacgaagaagcagatgatggaggcggccaagaagctggactttatcgaagcagctcagtttcgtgatgaactggtgaagctggaagatctgttagtgacaaaaaaggattgaaattggatcaagagatgaaacggacgctattttgtttgttcttttttgcttttctttccctacctggaaaagctcagagggataaggctatttacgaacgctattgtacggcagtgaaggagaaagcggctttgccgacaggtgacctgatggtagagaccgcccgttttttcttgggaactccttatgtagcagggacgttggaggaagagcctgaaacattggtgataaacctgcatggcttggattgcatgactttggtagagaatacggctgctttggtctggtctgtcaagcatcgtcttgcttatgatgggtatgtttctgtcttgaaagatatgcgttaccggaattccagctgtgcgacactcgattatacggatcgtctccattatacggctgactggatatatgaaaacgaaaagagagggtatctgaaggatgttacgaaagagatcggtgggcagtcgcttaagcttgacctgtcctttatgtctacacatccagatagttacaagcagttgaaaggaaatccgggacgtatcgcagtaatggcggctaaggaaaaagaaattagtgcccgcccacattattatattccgcaggatgaaatcaatgagcatgccggccaaatcaggaatggcgatatcgtctgttttgtcacgactgtgaaagggctggatatctcgcacgtcggtattgtctgccgggaaagggatatgcttacttttatccatgcctcgaccgtccagaagcgggtgatcgtgaacgaagaacctttgcaggaatacgtacagggtatcaaacgcaattgtggtattatgattgtccgtccacagttctgaacttactggaagagttcgaacgcgaacttgaatccgatcccgtcatatttcaatttatcgaacccgacgaaggcggcgacgttgaagatatggttaccgaaaccgtatccgatttcagtgtagctgggtttgacaggcatccatagctgactgaggtaaaaacgttcggagatgatgtgcttggttgcttctggtttgaatagctgaaagagcatgaatggactttcgtacatggcatgtgcttggacatatttgtcggatgcgttgaaccatacgcttcctagctggtggaagacacctccgaaatcgtctcctccccatgattcggggaagttgtgccgtgtgaaataccggtagtcggcaaagtaggttgacttctgggcagtataaagccctccgctgatatggtagttgaaccggcgtgacaggcccaggtaaatgctttggtggatatcggcctctacacgtccgtaattaccgctgcttttccatacgcctggtatggcccgcccgaactcgatggatatggtcgggtagtaggagtagaggtactctttacggtaaccgtccatccagtagtattgtctgggagtataggaaaagccgatcgtggggatgaaatcgtgatagttttcgttgatgatctccgtgacaccgtctcccggatctatcgcgcttttccgggttggtatgcggcggtggtaagagatgccggtggtcatttggaaaccgttgaacaactcgatctgattcttgagctctatgtaatagtgcttgaagtattccaaatccaggttttcgaagttgaaagtggagtctttcagctgttcgttaatttcgttcatgatcttggaagaatatccttggttggtgtttccgagactgaggctcagggctccttgtttctcaggaagatattcccaatctccctcgaatttgaagaacaactcttttcgtttgaatacaaaaccgacctcaggccggaaacgcagttggcggtctttcttgaaggtcttgctgaagcggagctgttgcctgtaagtaataccgtttcgtccggaatagcccaactggaaaggattcaggatgccggagtatttcagacgggtcgttttataatccagattgatggtgttggtcaggcgttctgttattttcaggtatttccgaatgttgcttgtgtcgttggcttgggttgttctgatgcttgttttttcgtattttgtttcttcttcctgggtcagtgggatgtctcttttgtttttccagtagctgctgtcgctgatgattgggatcgtatcagatgataactggtaatatccggtcaagtcgagggagtggtgttttttgtcttcatagtcttcttcaacccattcaacggcttcgtatttgaatgaagtatgatagtagctggcgatggcatttcccagcacatgataccggagaaataggtctgccttttgtggcaggatgaaatggcggtaatcccgtccgaatgtcatgaccaggttgaattcggcaaaagagaaacgcccgtttaagtcgatcttgtcaatgtgccagtctttgtcggtgatgtacagatctccgcaaatgagtttttggctccatagctttggcatgaagcgtatctggtagattttcagattgccggtcgtttcgatgctttccaggttgaagttgtagtatttgaatgcttcatgagctactggcatgatgatcccttcgttgtagatggttggcgaatagacgttcaggttcagaaatgtcaagacttcctgctgttttgcgccgttggggatgctgtttccgtttatcgcttcgaagctgtgcaggtagttgttcggggcgttgaacttggagtggctgaccatctcgaagatcatatccttgttcttcctgtctaccggaaaaagatgatgggcgaaacgcattagaatgttttgtttgagtatttccgtcttgcctttgatatagatttcggcctcgtaccgtgagacgactgttttgtatttgtcggcctgctcgattaccttcctcataatagaatccccttgctgggatgataccgttttgggggaccgacccagcaataaaaggttcccataactaccatcagggtcagctaaggcatttactgcggtaaaaagcagaatgataatataaaaatactttttcaacaaattatcgtctctttctttacaaacgtaacgaataaaatcgaatttttattcatttatcgtattaaacttattctgcttttaaaagaaaagtattacatttgtgcttcataagtatgttatatagcagtcgtggttaaacaacaaaaagaagaggtcgatctatcggccagtttggcagaagtgtggagagtcctgaccgaaaaggagcgggatgttctccgtaataattcgacgatccagcatttcaaacgtaatgagttgatatattgcgagggcgacgaaccgagagacatgatgtgcttattaaaaggcaaggttaaaatctttaaagaaggtgttggcggacgaagccagatcattcgaatgattaaaccggtgcagtactttggctaccgggcaaactttgctcaggaaaattacctgacgaatgcatccgcttttgaagcttcgacggtatgtctgattccgatgactatcgttacggatcttttaatggggaatgcgaaccttgccatgttttttatccgccagctttctctcgatttaggaattgctgacgaacgtacagtcaaccttactcagaaacatatccggggtcgtttggcggaatctttgttattcctgaaagacagttatggtttggaggaagatggagcgacattgagtatctatctttctcgagaagatttggctaatctttcgaatatgacgacatctaatgcaatccgtacattgtctacatttgtagctgagcgtattattgcaatcgacggtcgaaagatcaagttgatagacgaggacaagctcaaaaaaataagtaagatgggatagcagaataaattgagaattgaaaatggataattgaaaagtggaagagcccgttaaggttcctgtttttcaattatccattttttgtattataattttcaattctcgactttccaatttcaatttccaaccgcttcccgtattcgaaccaactttgtcagcagtccttccaataagtcgagttgcagcatgttcgcaccgtctgatttggctttagagggttccggatgggtttcgatgaataatccgtcagctccgacggcaatggctgctttggctatcgtttcgatcagggtagggagtcctcctgtcacacctgaagtttggttgggttgttgcaaggagtgggtaacgtccatgataacgggatagccgaactgctgcatttgaggaataccccgataatcgacaaccaggtccgtatatccgaatgtagtgcctctttccgtaatcatgacgttgtcatttccggcatcggctactttttgtacggcaaattgcatggctcccggcgagaggaactgtccttttttgatattgacaattttccttgtcttggcagcagctaccagcaggtccgtctgccggcagaggaaagcagggatttgcaggatatccacatactcggcagccattgcagcttcagctgtttcgtgaatatcggttacagtcggaataccgaacgtgtcgcctaccctgcggagtattttcagtgctttctcatcgccaatgcctgtgaaagaatccagccgagaacggttggctttccggtatgatcctttgaatatatatgggatattcagcttattcgtgataccgactactttctctgcaatacgcaatgccatatcttctccttcgattgcgcagggacctgccatcagaaaaaaattgtctctattctttaaatcattaactgttatcataatatgattgttttgtttcaaaattgggtagatttgaattgtaaatgctgatttgtcagtctaaatattcttataatttcaataactccaatgtcttctctatcttttcttctgtcggcaatgtagcatctatccaatggatggtgcttccccggcgctccatgcctctgaaccaggtcatttgccgtttggcaaactggtgtatggagatctccagttgggaaaccatatcttcataagacagtttgcctattatatataaagtaagatatttatattccagtccgtagtagatcagatcttccggcttaactcccgagtcgatgatcttccgcacctcgttgaccatcccttcgtccaggcggacacgcaagcgacgggagatcttttcgcgtcgtagctcccggtctatgtcgataccgatgatcaggctgttgattggatcatattcattgacatccggagcttcgttcttataatactcttcgatttcaatggcccggatggcccgttgggcggtatccacatctgtcttattatggaggaccttgtagccggcaagtatctgctccaattccgggagcgatttatctttcaacgactcgcgcagcccagggttctggggaacatccaagagtctatatcctttcagtacggcttcaatgtacatacctgtaccaccgcatagaatcggcagtttcccttttttctggattgtttcataagctcggaagaaatcatgctggtattcgaatacgttatatttatatcccggatcgcagatgtcgatcagatggtaaggaatcgtttttccatttactgtatagtcggccaggtcctttcctgtcccgatatccattgaacggtaaatctgtctggaatcggcgctgatgatttccgtgttcagtcgggcagcgagtgcagcggcaaatgttgttttaccggatgctgtcggccctaaaacagtgataagttgataggtatccatagtgatacaaagatacaaaaaactcgcaaaaaaacggcaaaatttggataaataaagtaagtatttggtattgaggagagttaagccaaattcttctatgcctttccaaatcgctaaaatgcaggataatgaaaggttaagagaaagatttgctacttatccgttgccttttttagccccggataatccggcaaaataacgcttgaccacctgcggttttaccgttcaccatgcaaagaaccctatattttgcccgtaaagataaccgtttttttccgtttttcatggaaatacaggttatgttaccggcatccggggttttattctttgttccgctataattttcataactgtaaataactctatatcaagtaattttgcaacataaaaaatagagttatgaaacagacggatgtaacggttacgttctacctcaaaaagagcgaaatgaatgacgagggacattgcccggtcatggcgaaacttgttgtcggcaaattttcagaagcggcttttagtgcgaaaatgtccgtacccgctgcactgtgggcatccggacgtgccacgggtaaaagtaacgccgcgcgggaaatcaaccggcaactggacgatttgcgagcttcagccatttccatttatgacgaactgtcagccacccgtgagaatgtaacggctgaagaaataaggaatctgttgttggggacggctttcgggcaggaaaccctgttgggttatttccggacgttcatcgaacatttcgaaaaacgtgtcggcgtgaaccgggaaaagggaacagcgcaatcttaccgctatgcttgtaactgtgtggctgctttcatccaggagaaatacaagttgtcggatgttcctttcacggccctgaaccgttcattcatcgacaactatgacctctacctacgcacggagcgccgctttgccctgggaactatcgtgttgcttgtcacacggttgaacacgattgtcggggaagccatcgcggaagggattatcactgccgacccgttcgcgggttatgaagccgaacatcccgagcgggaacagaaataccttaccgccgcagagttacaacggctgatgaccacacccctgcacgacccgaagctctaccatatccgcgacctgttcctcttctcctgctacacgggtatcccttacggggacatgtgccgcctgacgacggaggatctggaagtggccgaggacggtgaggtatggatcaagaccgcccgcaagaagacgaaaatcgactatgaagtgccgttgctcgacataccgttgctcatcctcgacaagtaccgggatatggccccggaaggaaaactgctgccgatgtacagcaacaacgaactcaaccggacgctgaaacgtattgccgccatttgcgggattgaacggaagctcgtctttcactgcggccgccatacctacgccaccgagatcacgctttcgcatggtgtcccgcttgaaaccgtcagtaaaatgctggggcatagccgcatttccacgacgcagatttacgccaaagtgaccgatgacaagatcgacatggatacccggtctttagaggaaaagattgccggccgcttctccgtagctatttaatctatcattgacaatcaaattcacaacgattatggaaccgaataataaagagataaaacgccgcagcacgttctccctgctgttctacatcaaccgcacgaaagtccgcaaggacggaacatgtaaattgttatgcaaggtaagcatcgatgccaagtcggccccgatcaatatcaacgcgtttgtcgatccatcgctctggaatccggaaaccaaaagggcgaacggacgaagcgagaacgcccgaacggtaaacctggcaatagagaaactgaccgaaaaaatcaccggacattaccgtcatattcgtaaaagcctcggtttcgtgacggccgagctggtcaaaaacgccgtggaaggaatcgggcagaaaccgttcaccctccttgccttgttccgcgagcataacgaggagttccgcaagcgtgtcggcgtggatcgcaaggaagaaacctatgaaagttacgagaactcctataatattttagcctccttcgtgaaaaaaaggaaggaaaaggaggatgtagcattgcggagccttgaccgggagttctacgatgattttgaaatattcctgcgtacagatcgtgaaatgaaacccaagacagtacacgagcatctttaccggttgaagaaaatgaccaagcgggctgtcagtcagggtacactccggcgcgacccttacgggaagctgcatccggaactgccccggcgcaagagccgccatttgaaactcgaagacctcaaaaagctgatggaaactcccgtcgataaacccaacctccagcgggtgcgggactggtttctcttcgctaccttcacggggttgtcctacgccgacctgaaacgcttgtccgaaaaagacatcacgcagtcggacgacggaacgtactggatacacatccggcgccagaagaccgaaacgccctcggccatccgcctgctgaacgtgccgttgcagatcatcgagaaataccgccacgagcgtaaaagcgacaggattttcaacctctattgccgggggtatctcatcaagctcaccagagaactgggacggacatacggcttcgacatgacctttcacaaggcgaggcacaatttcgggacacatatcacgctctcgttgggtgtgcctatcgaaactgtcagccgcatgatgggacacaagagcatttccaccacgcagatttacgccaaagtgaccgaccgcaaggtggacgaggacatgaaacggctgaaagaacagaccaaaggccggaaaataaatctctacgaggaggacgaaccggaaacggcagatattataacggtaaacggttgaacagtataacaaaaattgataaatttgtatgactatgacgacaagagaacctatcagcattgaaaacgggcgggtggaaatccacgcgccggagaaccgtgtatggctcacgcgccaccagattgccgacctgttcggagtcttcgttcctgccgtggggagcaacatccgctccatactcaaaagcggcatactctgtgaggagagggtttaccgccgggagcgcaaccgtgacggcggtattgtcgagctgtattcgctcgaaatgatcgccgcgctggctttccgcttaaaatccgggaatgccgaagccttccgacggtggcttgtccgaagggccacgacgatcgctgtcgtctggcagctccccggcatgaacacgatattgaactgaaaaagaagaacggccgtgatggccgttcttcttttatacccattcctgtcccccgatacatttcttccgggaatcttccaggaatttctgtatctcggattccatgtatagtaccttgccctgaatcaaataatagggaatgatccgcgccgtgcggtattcctgcaatgtacgcctgctgattttcagcagccgggacaattcctcgtcggtgacgaaccgctctcccttgagtgtccggcctccggaggattccagtttatccagtgccttgccggccttttccaagcgccggaagagatccgccacacgcggatcgtgcttgtcgatgaaataatggctcataacgcggcggtattaggatagtgcgacgattgcagcagtttcccgacatcttccggtttgtagaagattttgtgacggatgcggctgaaaggcagcaaccctttctcccggtaggtttgcagggtacgtttcgatatacccagcacgtcacagacatcctggttgtccagccattttttcaaactcacgtcctcctgcctgcggcataacgcctcggcttttctttcaatggcttccacgtgccctgccagcgcgtcgaaagccttcacgtccatacttattatttccatgttctgtttcattttttgtttcccggatgcccaaaagtacacaaatggacagtatcttgttatcagccagtggcatatggacgtatccgtcttaaaagtggcagcgagtggcgccatgtccggcggaaatgctcctccgccgatacgggatcgacacgctccgatacgccaatcgcccgtgaaaggaaatgttcgcgggcgatttatcattccatgcagggtgagccgtgaaccgactttcgcgagcgttcacggcatatcgttttctccccgtttctctcccataaccttttcctctcttttttttcatgccgcggagtgcggtatggaaatctgttgtcagtagcaaaggtagttacggggctcacgctgctgcaagatcgggccgcggggcggtttgccgcaaaatcttcctctttccctgcgggcgagcgtattttccgacaaaatcttgcagcagctatccccgacaccttttgatgctaccgaaacagattccatccataccggctccgctacggcataaaaaaaaagtcaaaggttatgagaaacgaagagaaaaataaatggaaacagaaatcctccaaccttccacttggcataaaggcaaaggtcgggttggcggtaaaggtcggggcggtggctttgggcttccacgtgtggggtatcgactttatttgggtcgttttgggcttcacgttctgttatgacatcctgcggggcattttctcctgccttgtttctctcgtggctctaaccggctttttctatttcctattcactcacatcttctaaattattacaggtatgacaaagtacatttcattattcggagcgactaccacggacacgcaggtgcaggtagtcaaggaaaaccaggttatcatcggtatcggtgcgggtgcgagcagaaagcgttacgtcgtttacaaggtggaacacaccgcccgtggctacgtgtaccacatggtcgataccgaaacaaaggaaatcagccaaacggacattctgcgacccctctcgcaaacattcggtatcggcaggtactacgacgacgtgaaccccgagttcatggacgctttcgaggtggctttgctcgtggggcaggcggaagagcaagccacggcgcaggccatcgccgccgccaaagagaaagccgagcatgaccgcatagcggaaataggggcgcagaggttacgccgcatcatgcccgaaggggtgcagggcgtaatcatcgccgaactcaacgaaacggaatacactgacccctcttacgagtgttcgaccacccgaagcgtgcgtaccgtcattctcggcttttcggccacctcccgcaacggcttcggggagttgagaaaggcggcggccaatttcccgcaaacggcgcacctctccgaatacgaccccaagaacgaacaccgctatcccgttttcacgctcggcaaaagtccgaaatacgggtggagtgtctgcaaactgacccactacacccgtgaagggtacatcgacaggctggcatatatcgcaggaaacgaggagaatatatgtctgcccgagccgaaagacgaaaaacgggcggaacgcactgaaacgagcgtgcaaggcgggtttatcatcgtggactattccgagaaggcgatagccgtattcggggacaccaagcccgtcaaggacgcccttcacgcactcgggggacgcttcaacgcacggctgacgcatgacgggcagaagaaagcgggatggattttccaaaagaccaaagaggacgaggtgcgacggcttctcggaaaggacgaataaatgttgaacacggggcggctcgccgccccacaataccaaaaaatcatggcacaaggaacagattatttcaaactgacgatacagaactatctcgacgcacgggcacgggaggacgaacttttcgcaccccgatacgccaacccgaaaaagaacattgacgattgctgcactttcatcatcaaccaagtacggcagagcggttgcaacgggtttgccgacgaggaaatatactctatggcactccactattacgacgaggaggacatcgacatcggcaaacccgtcagttgcaaggtagtggtcaatcacaccgtcgaactgaccgaggaggaaaaagccgaggcacggcggaacgccatacggaaggccgagagcgaagcctacgccaagttggcgaaagccaagtccaaacccaagaaaatcgaagataacaaactaatgcccagtctattttagttatgaaaccgagaacaaaattccaacagaacgtcgtggcggcaagcaaacacctgccgccgcttacccccgcacaaatcgaatgggggtacaagaactgcatcgagcatatcggacgccgcacgccgaaaggacttatcacctgcaccgagtgcggccacacgtggcagagcgaaaacggagaactcacggacaatctgttagggtgcgagtgtccgcactgccacaccacgctgaaagtggaaaccaccttgcgccgcaagttcaacgattacgagtatttgtgtatcgtaacccgctgcaagggttttcaagtcctgcgcttcgtctatatcgagtgttgggcgaaagtgggacagacacccgtttacacccatatcgaagccgtacagcggtggattgcccccgacggacgctccgcaaccttcgcacggctgcgcccgatgggcttcttcgttcacgggtggagttggtcgagcgcattggaactgcgggcggagaacgacgggaaatacaacatcacgcccacacgcatctatccccggcaacggcttatccccgaactgcgccgaagcggttacggcaaacaactccccgatgtaacccctttcgaccttatccacctgctgctctcggagaacaaggccgaaacgctgcttaaagcgggacaaacgacactcgtgcgatttttcgcccgttcctcccgcaatatcgcagactattggccggccatccgtatcgccatccgtaacgggtacgctatcgggaaaccgacggaatggtgcgactacatcgacctgctgcgatttttcgggaaagacctgcataacgcccatttcgtgtgtcccgcagacctgcccgcagcgcatgacctctacatggctaaaaaacggcggcacatgcaaatggaacggcggcaggaggaacggcgcaaggcgttggaacaggaagcctcgtttgtcgaagccaaagggcggtttttcggagtggagttttccgacggggaaatctgcatcaaggtattggacagcgttgaagccatacggcaggagggcgaggccatgcaccactgcgtgtttaccaacgaatactatctgaaagccgactcgctcatactctcggccacaatcgacggcaaacgtatcgaaacgatagaggtgtccctaaaacgcatggaggtcgtgcagagccgtggcgtgtgtaacaagaataccccataccacgggcaaatactgaaactgatgaaggggaacatgtcccttatacggaaacgaatgacagcataaaaatcggggcggcgaaagccgcccgcaaaaacaaaatagaatgaaccaaatagcatataaattcgtgtcgtgggacgttcccgcactcgaaagccttgcaggctcaaaagcgtacatattacgcaaacggctcaatgacgggggaacgctcacccgtgaggagaaagactggattacccgtgaggtaaaccataacacctatttcaaggactccattctgcttttagggtatcgtttcaactttgtcgatgtactgaaaacattcgtggtaaagcagtacgggcattacacggaatataagggcgtggacaagacgagcatacgctccatgttgtacggcagagtggaaaggattgtcgaattataaaatcggggcggcgaaagccgccctacaaaaaaaatataacaatgaaaatcatctataaaagctacatggcacgcccgctcaaacccttcggggagtgggattgggaagttcgggaagcagtcaagacggcccttgcgctcgtcgaggggaaaaacgggttcagaacccattccgagatatggcgaaggtgcaacctcgtcattaccgtgggacacaacatctacaccacgagtatcgagatacgaccacccgagcaggacgtgatacgccgcaggagcaactggcataacggctacgcctactactgcaacggcgtgttctgggcgaacatgagcagggttagagtggaacttgtctgattaaaaaatttcggggcggcaaaagccgcccgtaaaaagcgagaatatgaaaacgaatgaagtaaacaaggaaatctcctatgaaacgctgctcgtaaccttcggcgagggtatcgggcggctcgacaccatgttcgacgacccgcaggtgtggggcgttgccacgctgaagcagtggatcgacgggtatgaaactacgcgcttcaccgaaatcgacgaccgaacggcggttatcacatccgaatacaacatggacagcgtgaaggaatggctgcaaaagaacacaccgattatcaacctggaaaaacgataaaatcatgcgcaagtacaaattattcatcggctaccggctgctgggagagttttccggtatatgggaagccaaaaatttcgccgctgaaagcggcatgagcggaattttctcgctcgtgggagaaaattaccgggacagttggtacgaaccaaaaaaacaggacaagaatggaaacaaagattaaagacatcacgggagcggaaataaccgttaccgacttaaaagaggcggtacgccaatgccgggagtgcctcgcaagtccttacctgatgccctcggggcataccgtgggggaaaaccatgcctacatgttgcggcaactgctcgccctgcaaaggcggaaacgggaacacggcaggcaacggccgtgaaaatacgacgcgaaaaaaatcggacgataacaaccgtccgatttttttgtttcccgtcaatcgaccgccgtatggtcgcccagcttcccgtgcagttcacgcccgatatgtccggcaatgccacggggagaaatttcagagattgaaccccacccgccatgcgtgtatatgcacgtcttgagcggttcggtacgggaaaggtagaacagatagccgttgcggagcaggatgcccacgaacaccgagccgacctcgatgtcggcgatctcgtcaaaacgtatcttcccgtcattgtataatactgccgtgccatccgcatcgggaatgacgaacagatcgtcttccatgacaatcccgtgcaactcgattagcgaccccaggcattcactcgccgatacccggtcgtaatcactctttacctcatttgtcgatttcgtttccatatcgcttttctttaggttcagacaaataccatacgaaaaaggcgtgagaatacgttaaataccggcattgaggtacagccaagcacccatccactcgatagataatttctccccacgccgctatcgcatacgcttgacgcatatagacacgacgatgaagaagagaactacccattattttgcgagcggattaaaatttggctgttttcaatgccccaccataatgtgttccttccgtatgtaaatcgcccggcggcacgccgccggaggattcgattgcaaatataacgatttcatccgggtatcggcgacaacacgtgcgatttttaacaaccttcctgccaaagaactacccgccgtcctacaatttcggcccccgggcgggtttgcggggcgcgaccttcggctgcgccttcttctccctgggcggttcgacgatccgcagtttgagtttctccgtcttacggtcgtaacgcacctcgcagcagtcaatctcacccgcaaccgacgtccacacgttgttcacacgcaccgcgccgcccgagtagagggtcttgtattgttcgtattcgagcggctgccgcaatttcgcgtccacctgacggtggaacgagtagatattacgtccctttgctatctcgtcgggaacgtaaacccgcaactcgggatgggcggcctcggcatagaggcacagatccgccgtgcgaagctccctcggaacccactggatcatcctcgggtcgccccgcacggtcgtatcggccacgagcggcgtgatggccgtctggggaatgtcgtacagcacccccgcatccttgcgaacggcctccaacgccacctcctccgttacaagccggcggttcaggtgcaggacactcatcaaccggtgtatctgctgcgggtcgtcctgctcgcggaacacctgcaagaccagggcggggtcgctcaacgcgctgataaccgagaaatcggttttgtccttcccgtaggtacgctcgaaagcctcccggctcatctccggcgtccgggcttcgcgggggacgcctttcaggttttgcgggttctcccgcaccaggctcatgtatagatccgggcttttcatgctctcgggcaggtgggcgatggcatagggactgcgccgtatggcctccatgcacaactccggcgttttccacttctcggggacatattgcaggtagctcccgtcgtgcccgacggcccggcggcacatctcctcgttcttggcatgatcgggaaggttgtagaacagctccggctccagggcgaaaatttcccgggccaccctcggcgtgaggaaccaggggttcatgttctccaaaaaatcgaaggtcttatcgtaattcgtgcaatagaaccccaacactttcaggtgtatctcctcgaaggggatatagcggaggacacgcaggtcgtcggtacgggccaacgcccggttgcaaacctccggcgtgagctgttcggggttgaaaaagcggatggccaggggatcgcgctccagcgccatcccgcacagacggtcggttttcagatgcttcggaacgtactccagtgccaggtagttcgaggacacggcggcctcgcagacccgttccgtgcgtaattcctccggcacttcatggagtaggatgccgtccccactgacggcacgcaggcagactgcctccgtgcgcagttccaccggcacgagcgaaaggcaggacgcgtccatccccacgccgtgaagggccagttccccggtcatgacctccggggcaatggaggcgaaaatctcgaacttgtccacgaacgacatcccgaattttttcagcccttccaggcatatatcgggatacggaatgtaagggagtatcttgtaatcggcactgtccaccgctttcaacgccgtacggcatatttgcggcgtcctcaattccccgggaacggcctccagcaccaggccgttgcgcttcacggccgccatgcacagttcgggggtcttcaacccctccggaacgtaatacagcgcgtagctgttgctatcgacggcggcacggcacattttcggtgtcttcagacggtcagggacgaatttcagtgtttcgccccggtggccggccgcggcaagacaaagttccggcgttttcatcgcttcgggaacgaactcgatgttgaaagccgatttcttgatggcgaaacggcagacctccgccgttttccgatcctcgggcagcgtctcgaaaaggttctcacgccacgggttctcgtacacccccgtatcgagataggctatatctattctctcttgctctgtcatggttttcagtatttatggaaagcgcccgggtgacgggcgcttctcttggttagacatattccgttatcgttccgtttcctccgtcccgttctcgctctggaacgtgaaggaggtcttcacgacctgacccgtgttgtcctcgacatagacgtcgatggcctgctggtcatcgctgcgcgatgtgtaatagaggcggaacacctcacggtcgagcggatagcggtcgttgggcaggaacaccgtaccgtcgtccatcctcaactcaccgcgcccgtcgggctggaaatagcggatcgtgtaacgcgcgccgtcatatctcccctcccgcacgagcgtgcagcggatttcagcggtttcaccaacggagattcgcttctgaacgggcatcgtttccagagagaacgtgtacgcctgctgtatatccagcccgttgtcgcaggatgcgcataaaagacccagggcggcgatccagaccgccagggccaatatctttttcatctttttcatgtcgcttgcaagtttaatggattatgaatttcacgcccaggccgaactgcgcgtggaaatgtcccgttgtagtgccccataggatacgctcacgccccgtcagcgagaggataatcctgtcggtcaggtacgcatcgacctccagcgtgacggccccgccatagaggaaacggtcgcggtggcggagcgtagagccgtcatagagccgcctctcgccccggttcacactctcgtaaccggccagcgccgagccgccgaggtagaagaaaaaagtcctggacgggtcggcgaggaacttgtaatagtaaccgccctcggccgtgaactgcgccacagggatacgttccgacttgtaggggtaataacggttcaggaactccgcgccgaacacccacttgtcggcattcttcgcgtagcggctcatggccagcccgaaccagtagcccgtttcgctgcggctgtcccgggtatagaagccgtcggtcatgcctccccgtatttccagcccgcgcatggcgggcagggcacgctgggcgtgcgccccgtccgaaaggaggaggcataaccccagcgtgagaatgaatatcgcccgtttcatatcactttacctttaactcgttgataacacgtgcgcgcaccaggtcggcattctccaccgtgaaagtctggtgtcgcccgccctgctgctcgtgcagttccacgaccagctgcttgtcgtcggccagcgtgaacttcgggagcgtgaagaccatgcgctcggtacgcttgccgccgatgacctgcacgttgttgtacgcacgcacgggccatacgacctgctcctggatggccgtgcgtttggccaccttcttgtccgtaatcttgaacgtcaggtagtccacgttgaaaggcacgttggaggagtttttcagttggaggtggaaataaagcaggtcgttatgcacgtagatacctttgaggaggtattgtaccccgaaacgcttgcaaccgatatgcttgatctcgcggcggtcattcttgtaaatggactgcatgatcagtttgaccagcagcggagattcgcatcccaactcctgcaaatagatgtccagcgcgttattggggcggtttaccgcctccccgtcatgcaggaagtccgccatctcgaccgacagtttcaccggctcgtcggcatacttgacattgaagctgtaataggccccgtcctcggtaatgaccgaaaggttgctctcgcgcgagaaatcacgcagggccgcctttacacgcagcacgttttccgtgccgtcggctttcgccgccagaagatccgaagaccccagatcgacgtaacggatggccgaggggaaaatcacatgcacggtcttgctgaacgtcacctccagcgcgtagggcgggataacccggttgaaagtcagcggacgggtaagaccgtcgtacaaatcgcccgtggagggcttttcctgcgcgtgggcagcgaacatgcacccgataaaagcgagtgccagaagaatctttttcatactcgataaatttttgattgttgataaaaatggattttttcagtggtgtacggaagtacgtcgtttgtacccttattgaaggggcgggagcagcaggacgctgtaaccggccttgagcgtgaccttgaccgagcgcatcttcttgctcacgtattgcgacacgccctggatggcgctgcgccccaggtcggagagcagttgcgaaccggcatcgtccgtgatcgtgatactgctgcccatgcccgcgcccatattggcggcgatctccttcacggcattgagttcttccgaccccggcacgggaataccctcgttgccgttcgtgtcatagaccgacagatcgaccggaacgaccgccccgccgtgctggacagcgctgaccttgaccgtcagccgttctccgttgatcctcgccgcccccgttacgggcgtacccgaggggatgagcagatctcccgccatcatcggttccagcagccggaaagtaacctccccgccatcggtgagcgtcacggtttgctgcacggcggcacggatactgttgcgctcgggctcgcgaaggtcgctccccaccgtgttgaaaccccagttccggggcttgacgaactcacgggcgaagaccgaatcgggcagcggggcggcgagcagcgacacgatgttacggcgcacctggcgcacgggctgcacggaagccttgccggaaacggaggtcttctgacgcggggcttcaggggcctgaccgccattcatatagcgggcggcgatctcgtaggacttctccagcagcgccacctgctcctcctgggccgttttctgcgcctgctgttcttccaggcggcgttccagttcctcgatgcgggcctgcatctcgcgctcttcccccgtttcaccggcggtgtcctcgtagaaactgcctaactggcggttgatgtcggcataggcggcacgggaagtccggaaagctcccgacgaaccgccgacagagccggaagacttatccggcacggcagcgggcatgacgggctcttcctcctcgtcctccatcccgaacgcgaaatcctgcaaggagcgcatcttttcccgctccctgcgccgcatctcctcctgcacgtaggcatcacgcttgtccgagagaataccctccgattccggggtcggcagctccgtgttgaaacccgccgaaggctcctcccgttctttttcgccgggggagaagatcagccacatgcacccggcaaaggccaggaaaaagagcgggaagaccaccagcttcttccgcatctgtatctgccggggcgtgagttcctttttccccgcctccggctgtttattctgtttttcgttcgtcgtcataattgaaatcttttagatgttttacactgtcggcctcctgccgttgtcttaattccagttccagccgctcgatatgccgtatctgtatccgttccccggctcccttgccgaagcggtagatggaagacacggtaaagtagagcgacaagacggaaaagaacaagagcagcgtgaggatcacgataatccgcttatcgggcgagagcgccccgcaagcgcggcgcaggtggtcttcgacccactccccgaaagcctttattctcttctttgccatagccttatctttttaatgtacgtaaatcgcggttctccagaatctcgaatttctccatgatgaaaccctgcgggttattgtccgaacgccccgagttgatcagctcgcagcgcgtgaccagcgaacgctcggtgatgttgctctcgcggacaatcatttgccgggcataggtcatggcccggtagggataggcgttgaagtcgcacaccacggagtccacctcgatacgctggctgatgttccccgacaccacacggttgtagtaacctttctcctgcatgtcctggtaataggcgaaggcgctcttatcgaccaggaacagcgcgcggttgatgttgctctcgatggccgcacggtcgggcgagagggtgaagaacaactcgtgaaaacgccggatatgttcgcgcgcctccacggggcggttctggctcaaatcctgcgagagcgccagcatcagcgacttgcccccgtccaggacgtagatcttctcgcgctgcttttcggcgaaacggaagctcgcgaccacgctgaacacggataccagcgcgcacaggcagaggaacacgataccgaaaagccgaatctgcctgaaacttgtttcgatgttttttaatgacttgaattccattgtccaaattgttatgaatgattactgttaccttgtgttgccaggttgcgcccgttgggggcactgcccgaagccgggccaccgccgccgttaccggaggaggaaccgccaccgccgcgacgcccgaacgtgcggccgatcatgttgccggcgataccgcccgcgacacccgtggcgaatgtcccggccttgttgataccgcccatagccccgccggctccgcccgactggatcacccactcggcaacggtggggatcgtgaaatagcctatgatacctataatcaaaaagataatatagacaccgctgccgctgtcgggaatgtagttggggtcttgcagggccaggacgtccgcctggagcatcaacgtctggatcttggccagcaccgcggagaacaggtcggcgatgggaagccaaaggtacacgctgatatagcgggaaatccagctcgcgagcgtcgagtggaagccgtcgtaaatggagagggcgaacgacaagggccccagaatcgacagcacgactaaaaagaatgtccgcagcgtgtcgatggtaagccccgcggcgttgaacaacaactcgaagaagtcccggacaagctgccggaaaccggccttgatgtcgtaccacgtgcgttcggcccacatgctgataatctcgcccaagtccgtgatacccatatccgcaagccgttgttcatacacctcgtcgtccactaaccaagccttgccctcgcgcctgcgggcctcggcttccaaatcgtccttctgttgctggtatgcctgcaaatccaatgtctgcccctccagtatggcgtgcgtgccctgcaccacgggcgacatcacggcgttgatcgtccccagaaccacggtgggaaagaacatcacgcacaagccgatggcgaaaggccgcaggagcgggaacacgtcgataggctccgcgctggccagtgccttccatacccggtaagccacgtaaaagagcgcacccaggccggcgatacctttcgccaccccgatcatgtcgccgcatagcggcatcatctcctgatacaggttccggagaacctggtgtaaattgtcgaaatccatgactgcctccgttttcaggttaccaatatctgtcgttcgggttcccgtaaagtgccagcacccggtgcgcgtcacccttttcgcggctgcggatgaaggacacggagatggtcttgcgcgtgtaatagcgcgtgaggttgcggtactccagcatcttcgtgtaaacctgatccaccacgtccatccgctccttgtccgagagcgagaggccgttgccgccggttatgaccgtcttgagttccgccaccagcgcgccgccctcctccagcagccgggcgtaacccgccgagatcgccgccagctcgtccaccgtgaagttcgggtctgaaaccatacggttgaatcccgaggtgtagatctccgtgatctcgctgaccatttcgagcgtcagcttcaccttccgggcatccttgatgatgttatgcaccgatttgagggcgtcgtagtaagccttgctctggttataaatcttgatactctcttgcagcgacttgaccatgttggtcgccgtggtcgagctttgaaccgcgctcttgatgttctgaacgaggttcgacgggtcgatgaccgtccactgcgcttttgcctggtacgtgaagcaaagaagccccacgaacagcgttaaaatcaatcgtttcatccttttcattatttaattcgtgaatacttgggcggtcattccgacgcccggtaataatccccgtaggcggagagctggagcacctcgcgccccgcatcgtaggccagggcgacatacccgtagaggtcgaagtaacggatacctccccaatacttcctcacgggacgggagaagcgtgtcccgtccttgtaggacacctccacgtaaaaaccgccgccccggcgtcccgggttgcggtagatgcgaacccggggagaacccgagcggctttcccactcgcccgccacctcgtacagcgcgaagtccaaacgcgccgccgtggggtctgatccgatacacttgcgatacatggcctgccctccctttaacgtttgccctcggcgagctgcctgatcgccagttccatatcaccgcccagctcgccggcaagccgctgtacctccactttctccgtttcctcggtcgtgtaggccaggtactccgggacgctgacctccgtggcatagaccgccgactgaacgccgcccagaccgatccagacctccttgtatttacgggaagggtcgttggactggttgatcgagagaatctgcgccttctccttgtcggtcagccccaacaaggactgaatcgcgtcgaaacggttcatgaacttgcgctggtcgagcaggatcttgcagtccgagttgttgatgatcgcctccttgaccaccgggctggaaatgatgtcctcgacctcctgcgtcacaacgatggcctcaccgtagtatttgcggacggttttatacatataacgcagatattcagccatattggccgtagagagcgccttccaggcctcctcgacgatgagctgtttgcgtacccccttgagccgtctcatcttgtttatgaaagcctccatgatgatgatggtgaccacgggaaaaagctccttgttttccttgatggaatccacctcgaagaccacgaagcgcttcgagagcaggtcgatgttggcccgggagttcagaaggaagtcgtagcgtccgcccttataatactgccgcagggtgatgagcatgttgtcgatgttgaaatcctcgcggctgacccggatctcccgctcctccagctcgcggcggtagtcgtcccgcaggtactcgtagaaactgtcaaaacacggcacgatattccggtcggcgcggatacgctcgatataggcgttcacggcactgcccagctcgccgctctcggtcttcgtgatcttgtcgtcctcggttttccagagtgtcagcagcagcgtcttgatgctgtccttcttctccacgtcgaaatagtagtcgtcggtgtagaacgggttgaaactgatgggatgttcctcggtataggtaaaatacacgccgtcctcacctttggtcttacgccggatcagctcgcaaaggccctggtagctgttaccggtatccaccagcacgacatgcgtgccctgctcccagtattggcggactaaatgattcataaagaatgacttgcctgaccccgagccgcctaacacgaatttattcctgttggtaatgatcccttttttcatcggttcgtccgagatgtccaggtgcaggggcctgccgcttacgcggtcgcacagcttgatgccgaaagggctggacgaggatttatagttggtttcctccgtgaagaaacagactgcgggctcgatgaacgtgtagaacgattcctcggcggggaaatcccccgcgttgcccggcatacccgcccagtagagcgtggcggcgtccacggtgttgtggcgcgggcggcactccatcagagcgagctggctgcccacatcattgcggatatgccggagctcctgcacgtcgtccgaccaggccagcacgttgaaatgggcccggacggattgaagaccgaacgagtgcgcctcgttgagatactggtcgatccactccttgtttatctggtttccgcgggagtagcgggaaagggactgcatgttacgcgcacgtttctcgaacatacgcaggttttcgtcgctgtcttccaggaacacgtactggttgtaaaggtggtcgcaggaaagcagaagccccacgggggccgcgaacgagagcaggcagtccgaacggtcggtggaaagacgctcgtaacgggtgtccgtacccacgcgccccggcaggtcttccgtgtccgagagcgtgtgcaggcacacccgtttgttacccacgcgcagaacctcggcccccagctcgatgtcctgaagagaagtcgtctccgagagcgagagggaaaagtaccgctccagcaggcccggacaatccgccgtacccgtgatctcgtcccccgtgaggcggacaagggtcaggaaacccgaatcgttcagaatacgctcgaactgttccgccgcctccaggaattttgtcgccgattcccggtttacctctttgggaatgatgttgccccggcagagggtcgagaagtctgaacgcatgtgcatacgctccctcgtcgttttcgtcaggtagaggaagcaggcgtgggtcaggaacggacgctcgttgaaatgccgctcgtaactgcgggagaggaaactcatgtccccctcgcccgtggccgggcggtaacgctcgcggatgaaccagtcctgcttgtgtaccacgctgtattcgggcaagaccttcagggccttgcaccaggcggcgtggatcgcctcgtactcggcggacgtgacggtgaacagctccgggagttcgacccgatagacgaccgttatgtccgcgtccttgctgatgatacaaccgccttccacggccaggagcgggaacttgctttccagcgtggtggctttcaagatgtttctcatacgcggcccccctttcttttcagcaaccggcgcagggacttgcggttgagcaggtagcggggatgccggcgcgcggcgagcagcttcatcagcccgtgttccccgtaacgggcgttcaggcggaaggtaagccagaccagcaccgaagccgccgcaacgccgaaagcgatacatacccactgatcgacccctgccatgtagaggatgacgaacaccacgaagacggccagcaggccgcccgcgaaaatgaagaggtactgcgccttcaggccccggaactccacgctcttgccgattcccttgttgattccatattccataattatttgcatgacaggttggactacaagaagaaagagcgtaggatcgtcgcggcgacaatcaggaaaatacacgcgccgaaccagctcgcggcggtcttcgacgtgtcggggtcgccgctcgaaaacttgttatagaccttgatgcccccgataaggccgaccacagcccccacagcgtacacgagtttcgtgccggggtcgaagtaactggttaccatgttggtagcctccgtaatgccggcgatgccgttgccctgcgcgaaagcggaggagatggcggcaaagagaaatgccgccggaagaagaatcttgttctttctcataactcgataatgtttgaattgtggcgcggggatggataggccccgcaccgggttaaacttcttgattcggattttttcagtggttcgaggatagcctcacgcgctacccgtagtctttttctttcatcgtgatgtcattatggggttaaacaaactcacggacgtcgaaacccgtgggaaccgaaccctgcggagatgggctttccgcagacctctcggacatacgccggtgaaaggccgagaggtaggtgtcgatcagggattttaccctgtcgttcccgtcggggcgacccgaaacgatgacctcgaacatgtcggtctgtttcaggcccaggaggacacgtcccgtttcctccctttgctcgtctgttgaaggtggatcatgtaccacgtggcggtaggcttcgcccatctgttcaaaactaaccccctgggcaagcgagcggcccaaaaggggcagctcttcggtgtcgtcttcatcctcgtcataatccggctcctccgcgtccgcatccgggaaagattcatcgtacagcggaaagtcgatttccagaggttcgttaggctccccctcgggagcgacaccgaacacttcatccaggtcttccggcggaatctgccgggggtgttcgggtacattcgtgggcacaaatatatcggctttttccgtaactttttcagtttcagattctacggcagcttgtggccgggagtggcgcgggtcgaggacaaagcggctcctgccgatgatctcctgccggcagggagtgtcttcggcaacgatcccgtctgccggttcgttacgttccatccgccgcaggcggaaaaacgcccacaaggcataccccacggcaaagaggggcagcagccacaacgccccgttcatcgctcctccgctttgggttgccgggaggccacggcctcacgctcctcgaaaagccgctcgatggtttcccggttatcatccaggtgtgccttgagaaccttgtccacgtaggccgtgatcgtcacgtcgccacgaccgatgacacgggtgatctcgcggatacgctcgtgatacgacggacgtatcttcacgtgcttgttaccggcgaaaggcagccgcagcaggcagatgtaacgggccaggtactcggcctcgggggtggggacagtccccacggcgacctcccccgaagggccgtcggggacgataagggttttcatcctgcgccggtagcggcacacgcggaagatgaagggcacggcgacgcaaaggacggccgccaggataacagataaaataattgctttgtctgacatgatggattgtttttaatggattgtaaaaaatattgggttcataactaaaaaatatcggagttccgtttcttgtagagttccgaaatttcctcctgataggtcgcgaaatgctgctccagcacattgtccaggtagctatacagcgagagttcgttcttaccgataacctgcactatccgggttatacgctcgtgaaactccttgcggatatacaccgttttgccgcttcgggtattggaggaggcgttccggataaaaagacgctcgtaatcctggcctttccctcttcggcggcgtccctcctctttcgtagccggcgaggaggcggcctcgccggacggttccgatagagccgatgcctcctcctctttttccggcgtgtaaggatgcaatggccggtttcggcttttggcctggctgatgatgaaggaagcgtccaaaccgtcgtcatgttcttttccgctcataagatcctactttaacagttcgatcaattcatccacgagtttatccaggttgctgccccggatcaaagaacggtctgccgggaagagcgtggagcggaagacagagcgacggctggcgttctgctcacgacgaaaacgcttggtgtcaggcaggaaggtcttcagaacaggaagacccagctctttcattaccgcctcgtaaacctgatataactctgtcttttcacgtccgtccaccatgttccatagcatatacagccctttcatccgggacttctcgcggcccatgatatgctcctttaccacaaccgcgtaattcagggtgctttccatgacaacccggtcggcactgatcggggcgacgagataatccattccggccagggaatgaatcagatcctcgttattgatcgtaccgggaaggtcgaagaacacataatcgaaatcaccttgcggcaggaggtagtcggcatcggccaacgcctctttcgtgttgctttccacgacaggataggctttcttttgaagccgggtgaattgttcgtaagctaacctcttgtaatgttcgtcttcgagggcaagcttcaggtcacgttcccgcatctccacgatggagtgttggggataatcgcagtcgatgaccgcgacattgaaaccctttacatagtgcaggtaagaggctgccagcaccgtgagggtggttttgcccgctccgcctttctgggtggagaaggccacgaatttcgttttctctttcattgttccatgcgtttttagttatacaatcgggtaatcgttcatctcttcacgtatccgggcaagtgacggcatgagattttatgctggtatgccggcacgcatatatgctggtgcgctggcaggctgttacgccggtatgccggtgcatgggcgcgtgtccgattttatactcatgcgcaaccgcatttgcttatccggacaaagacccgctttttcctctgcacacgatgttttctgcatccgtccgcacgtgtgcggacaggaggatgtgtcattgcccgtatccgttctcacgtgcaaagtaaacccttaaaaacacgggttgtatgctctttttccgctatggccgcgtgtggcgtcaaagtggacgcaagtggcgtaatcgcttatagcacaagtgattgaataggtcggtatctttgcctcgtgaacgatcccgacgctaatgaagccgtccttgccccgttttacggcggctctttcaatattctgtccgcgagcgggcagaaagtatttgcaaagggcaaatagcaagctgtgttttctgctgcacgattctcgttttgcagcagaaaacagcttgcccgcaagggggagaaagcacctccggagtcggtgcttttcagaagggcggcaagccgcgaagggatcggaattttcaggaaccgggaggctctggcctctccttaaaatttcgatgcgatggaaaagaacagaaagccccgagggggcaaagggggacgacccgcgaaaaacgacccggccgtttaccgcttttcggtaaacttttcagccgtggaacatgcccgtttcctcgacctttacgagcagtccgggctattgtccaaagccgcttttatcaaagcgagagtgttcaacgaggcgttccgggtggtaaagaccgaccggggaacgctcgaatacgtggcgaagctgaccgctttccacgcccaattccgtgccgtgggaacgaattacaaccaggtagtgaaggagctgcacgcgcatttttccgagaagaaaacactcgcgctgctctataaactggagagagcgacacgtgaactggcggccgtcgggcagcaggtcgtgtcgctctccgaagagttcaaacagcgatggtagccaatatcaccaccggaaaagacgtgtacggtgcgctggcgtacaaccaggagaaagtcgatcggggcgacgggaaggtactgctgacccacatcgtgagggagccggtggatgggcgcttcaacgtggccgcgacggcagaagacctcctgcgctggatgccctcgcactaccggacggaaaaacccgtcgtgcacgtgtcgctcaacccggctcccgaagaccgcctcgacgacgggcagctcgcggagatagccggggcctacatggagcgcatgggctggggaggacaaccttatatcgtattcaagcataccgacatcggacgggagcatatccatatcgtgtcggtgcaggtggcccaggacgggcgcaagataaacgacagcaggcgcaacgaacgcagcgtggccgttaccgaggaactggaacgggagtacggactgcatcccgccaaagggagaaggcgggagaaagggcaagggatcgtccccgccgattacacgcggggcgacctgaaacgccaggtggcagcggtaataaaaccggccgtggcgacataccgcttccaaaccctcggcgagttccgggcattgctgtcccgatataatataggtatagaggaagtccggggagagcggaacggaaccccctaccggggattgctctacacgctgctggacgagaacggggacaaggcagtggccgcgccgctcaaatcctcactgttcggtaaagaggtcgggtatgacgggctggaacggcacatggagcgcagcgccgaacggttcgggaaggacgacacgaggaggcaaatccgtggccgggtcgataaagcgcttcggggagaacccacggaggaagaactgcgcgaacgcctgcggggagcccgggtggatctctacatacgacgcaacgaaaacggccgcatcgtgggtgtgacgttcattgaccacgaaacacggacggtcgtgaacggatcacggctgggaaaggcatactcggccaacgccttcgagttgcgcttcggcggaaaacggaatcccggggaaaacacgaggggcttgtccccgaaacaagtgcctgccggacgggacgggcaacggaagcggaatacctcacgacggaggaaagtataacatctcaattatcattcatttattaaatcttacggttatgcaacaggaagacgaccttcggggtcttgcaaaaacaatggatttcatgcgggcattgagtatcttgttcgtggttatcaacatctactggttctgctacgggcagatacgggaatggggaatcaatatcggcgtggtcgataggattctgctgaacttcgaccgcaccgcggggctgttccggaatatactatggacgaaacttttcgccgtcgtgttcctcgccctttcatgcctcgggacaaaaggagtaaaagaggagaaaattacctggcggaaaatcacggcatcgctggccacgggaggcgtgctgttcttcttcaactggtggctgctggacttgccgctgacggcggtggcgaacgcggctttctacatactgaccctatcggccgggtatatctgcctcttgatgggcggcgtgtggatgtcccgcctgctgaagaacaatctcatggatgaccctttcaacaacgagaacgaatcattccagcaggaaacacgcctgatcgagaacgagtactccataaatctgccgacgaaattttactataacaaacagtggaacaacgggttcgccaacgtcgtaaacccgcaaagggcttgcatctgcatgggaagcccgggtagtggaaagagttattgtgttgtaaaccagttcattaaacagcaaatcgaaaagggctatacccaatacatctatgactacaagtttcccgatctttcggaaatcgcctacaaccacctgctgaatcaccagaaaggttacaagaaaatcccgactttctacgtcataaatttcgatgacccgcgccgctcgcaccgctgtaaccccattcacccggacttcatgaccgatatttcggacgcctacgagagcgcctataccatcatgctcaacctgaaccgaagctgggtgtgacctgaaaagtcacgtaattgattgttaaacagcaatgtatattgcaagatttaacccgctgttccgtcagcggtagcctactataaggtgcatctccagtgatgggttgtgctaagcttataggacaaagtacactttccgaaaggacaagactgaaccgtgagggaacgtcaagggcggttagtatcataccgtcgagtggcgaggctggatagcatggttaacgtaatgtgaactgactttagccgtcgtaaggtttgaaggagcgcaagatactttagctctcaccaaaaggtaagcagtcggataaccctcgcccatgttggggttacacggacatagcactgccggcggacttggcagaacctaaactatccgtttgtcaattgcgtggaacagggcaagcctgtatctctctcgtaataatgcgagtaagcgaaccgcaaggcaagccgaatggggtgcaggtatgagataacggagaaagcgaatgccgccctgtaatggggaggatacggattgaaccaacatcacgagttaatgagggtaacatcatccgacacgaaagtgggcagacttccgtatatggtaactctttacaagataacttttagaactttcaaaaggaggaaagcaaatgaacgagattaaaacatcgtgtgcgcctgctgacagcaggaatctgacttgggacggtatgaactggtctaagtgtgaaacctatgtccgaaagctacaagcgcgtattgtaaaggctcagaaagaaggcagacataacaaggtgaaaaccttgcagtggatgcttacccactctttttacgccaaggcattggcagtaaagagggtttgtaatcggtaattttgtatcgtcaaaaatcggaaaagtaaaatcgacaatagaataaaagaaaatagcattgtaaattagagttgtcaacaactaatcacaatgctatgagtgagacttccaaattacagaagtatctaatgtggtacaaagttaaagaattattttcaaatggcctaaacaagagtcaaataggcatatcattaggtcttcaccgtcaaacggtgtccaagtatctgtctatgacagaagaagagtttaagcagagtcaaagttacgagcgccgatacagccataaacttgatgattatgaagcttatgttatcggagagttacgcaaatggccatttttgtcatctccgcaactccatgaccgtttacgggaacattttacagaccttccccatgtcacagctaaaacggtatccaactttgtcaaccgagtacgtctgaatcataatctgcccaaagaattggaaaagagttaccgtccttatgagaagcaaccggaaacaccttatggtcaatatgcccaatgcgattttggagaacgctggatgaagacttcgcaaggcatacccttgaaagtatatttttttgcaatgagtcttagccgtagccgttataaatttatttatttcagccgtaccccgtttactaccgatcttgcagtttatgcccacgaacttgcctttgaatatttctcgggagtacctcggaaaatagtttatgaccaggacaaggtttttcttgtcaaggagaacctaggagacctgatacttacccacggctttcgagccttggttcgtgaacatgggttcgagccggtgttctgccgtaaatcagatcccgaaagcaaaggaaagatagagaacgtagtgaagtacgtaaagtacaattttctccggggacgtgaatttacctccatagagcaactcaacgaggaggttcaagcatggttgcaacgtactgctaacggtatggagcatcatggcatacgtcgtatcccatcagtggagttcgagatggaaagaccccatctcatgccttatcggggaattccgacaatcccttccccaaagcttttaccccatcatgtcaggaaggataacgtgattacctacaaggggaactattacagtgttcctacaggtacctaccaaggtcaccgaacacaggtatatctggaagaaaaggaagagatgctgtatatttacagccttgaaacagggaaaaatatagcagcacacaaaatctgcaaagataaaggacagttaataagtaatacctcacatcggcgagaccgtgaagctgccttggatgattacgaggctactgtccgtaaaagacttcccggggatacggtcattgatacctatttatctgaactacgcattcataagaatcgtaactatagagacaacctgcagtttatacttctccgatatcccttctatacagaacccacgttgatagaagcctttacaagatgtttggaagtgaaggtctttaatggatgtagcctgatgaaagtagccgaaagtatcagagtccacaaaggagaggcccttgtggaagttcctgtagaaacagagccggtcccatcctccgatacctcttccatggtgcccgataaaacagacatatcaacattcaataccttttttatatgataatgaacgaacagattaaaaatttatgctcgcgtttacgcttgtatgcccttccgaggttattggaatccgaagcccatattgcacgggaacagagcaagacctatgttgaatttttacatgatttgcttgctagagaagttctggaaagggatagcaaagacttacaacggcgactaaaagcagcttctctgccgtcaagacacgacctagaccttttcgaccataattactcacaaggcataaccgcaccaagactgcgtgaattaaggcatctcggatggcttgaacagaattacaatctgatactcatgggaccatccggtaccgggaaaacatttattgcggcaggacttgtctatgaagcggtatcgcaaggttacaaggcatacatggttacgatggaagatgttataaacaccattaaaatgaaaacactgatgccatctgccatgactgcctacaaccgtttgttgaaagctgacctcgtcgccattgatgatataatgctgttccctgtgaaaaaagaagatgcagcgggtttctttaacctaatcaacactctccatgagaaagcgtccttgataatcacaacaaacaaggctccgactgaatgggcaaaaactctggatgatgaagtgcttgcctctgctatacttgatcggcttttgtatcattgtgaagtcattaaactctctggacaaagctacagaatgggaaatagaaaatccatctttgacaatgataaagaataaggataatcccctttaaatagggtttggctatagtatttaattgatattattaacattttgtctcgacttatttgtgtcgattttacttttccgaaaattgtcgatttaaaatttgcttattacagggttacttccaacaaagggaagaatacgtctggagtagataaacagctttgggactctcccaagcgcaagtacaaagcaatcggtgaacttagacgtcgtggctaccatccacagccgctccgtagggttcacatcaagaaaaagaacggtaaactccgaccgttgggaataccgaccatgaaagacagggcgatgcaagcattatatctcatggcattggaaccgatagccgaaacgacaggcgaccgtttttcttacggcttccgaaagaagcgcaggacaatggacgcaattcgtcagattgatacggttctaaatcgccagcattcccccgaatggattttggagggagatattaagggttgcttcgaccacatcagtcacggctggcttattgaaaatatccctatggataaaacaatactcagaaaatggctgaaatgtggagctgtattcaatggtaaactgttcccgacagaagagggtacaccacaaggaggtatcatatcaccgacacttgcaaatatggcacttgacggacttcaaccactcttggctgaaagattcaaaagacgtttcatcaactataagacattccactacaaagtgaatcttatcaggtatgcggacgactttataatcacaggtcgagataaggaattattggaaaacgaggtcaaaccaatggtgatagaatttctcaaagaaaggggtcttaccttatccgaagagaaaactaccattacgaacatatacgatggatttgatttcttaggtttcaatgtaaggaagttcggcaaaaggctgtacacatctccgtccaaagatgcacagaaacgctttagggcaaaaatcagtgacatcgttaaaggacataaaatgtgtaagcaggaatcgctgatacgaatgctcaatcctgtgataacaggttggggaaactattaccgatatggtgcatcaaccaatgcttttcacggttgcgacaatcacatttacaacctcacaaagaaatgggctttacgtcgccacccaaagaaacgcaagtcttgggttgcagataagtattggcatgaaattcgggggcgtaaatggacgtttgcatggaaatatgaaacaaaaagcaagaaagtgaactacctgacccttaaaaggttgtcggatatacattatactccgtacaagcaagtcaagggggaggcaaaccctttcgacccggaatatgatgattatttctttcagcgaaaggagcaacaaatgctggaatctctcaaaggacgtaagtcactcttatatttatggaacaagcagaagcggacttgtccgttatgcggcaaggagatagattgtacaaaagcatggaacgtcaatgaaatatctgttggtggttcaattgtacggcaacttgtccataacaactgctacaagcgaaataaacgaaactgttgaaagtatgagccgatttctaacaacaaatagaaatattgagttgcttgagccgtatgaggggaaactctcacgtacggttcttaggggagaagggggcagtaatgcccttgacttacccgatgtgcagaagcagggcgatttttttgtggaaagccccattatccttttcgcggccgtgatctggttcctgcgcatctacgacaacgggcggtattgtaccttcccgcacgccatcgagttcctgaacaagcggtacgaggatattttcccgattctgacatcctacccggaactcgaaaactacctcagcccctttatggatgcctggctcggaggcgctcaagaccagctccagggccagatagcatcggccaaaattccgctttcccgcatgatttcgccccagctatattgggtcatgtcgggcgatgacttcacgctcgacatcaacaacccggacgatcccaagatactctgcgtggggaacaaccccgacaggcaaaacatttacggagcggctttgggattgtataattcccggattgtcaagctcataaataagaaaggccagctcaaatcgggcatcatcatcgacgagttgccgacaatctacttcaagggactcgacaacctgatcgccacggccagaagcaacaaggtcgccgtgctgctgtgcttccaggatttttcacagttgaagagggactacggggacaaggaggccgccgtcgtgatgaacacggtgggcaacatcttctccgggcaggtcgtaggtgaaacggccaagacactctcggaacggttcggtaaggtattgcagaagcggcagagcatgacgttgagccgcagcgacaaatcgacatccatatccacgcagctggacagcctgatcccggcctcgaagatctcgacgctcacgcagggaatgttcgtcggggccgtggcggacaatttcgacgaacgtatcgagcagaagattttccactgcgagattgtcgtggacaacgaaaaagtgaaagcggaaacggcccggtacaagaagataccacaaattaccgatttcacggacgagaacgggacggatcacatgaaacaggtcgtgcaggaaaactacgaacgtatcaaggcggaggccggccgcatcgtcgccgaggaactggaacgtatcaagaacgacccggtgctttgcaagctcctgccggaacagaactaaatgaacacaaacacccccgcaaacaacctccgtgaccttaacgggggctgtttcctggttttataaccgcacagccggtgttttggagcataaagtagtgattatgtgaacggaaaacattatttttgtgttcggaatccttttaattataagtatgacagttaccgatatatacgaagcaatgaacagcaaggcggaagcgtttttcgagtggttgcaggctcacccgaaatacgggttgctgtttggtgtcgggttgcttgccctatggcttgcagggttgctgttccgttggaaatgggcgtgtcattggcagtttaacagcaaactgtggttatttgacgattgcaagcctgaaacacgccgcagggttcagattgtgttggtcagcgttctgattatacttatattggttggtttctttgtatggagataacggtatggaaaaggacaatcgcaaataccggatctgcttcatcgactatatgtggtatgtagccgagatatggcacgaaagggagcgtaccaatctcaacggacgtatgctactgttttggtgctggctcttcgtcctactcataccgcttggggttccgccgatattgcgccttttcggctggatgattggtttggccatagtgattcctctctgctttcttcccgatttattctgcaagctacgctatacagccggacggcgtgaagcgctccgtgaacattacgggaagatgaaacatcccggcaggaagctcgccaaaatagttcttatcgctatcgccctgatcgtggcaaatgtagcgctgatgttccacctcggatttatacattgggcatgatgaaacggcaggagaataagcaacggttctatctctgggactacctctggtggatgggggagaaattggaacaagcaagacgaacaggcagggtcgatggcgaaatgatgctctcgatttatatcttcgctcttttgatattccctatgatgactgttactatccggctttttccaggtgtgtcggcattgttgccatgtgtcgtttttagcattgtcacatttgccgttatgtcgctcgtcagcaggatttacaaatggcgaggcaaagcagtgatgtctcactatgccaagtgcaggtttaacgaactccttgcggttctgttatttttccttgcgatagccattatctgctttatgatgtatcttcttgacaaaaagtgaaacaagctttgatacgaactccgggccgttatatcgaatggtctaactcgatgtaccagtttcccttgatgggtttgtaaagcgtggtgtcgttgtacgtcctgcggtagatctcgttcaggtcgccatattcggtgatacggatattccgacggcttctcaatccgggatcgtaaacgaaactcttggacgttcccgcatccacgatgccgtgggagtagtacggcataacaaggctcacatataccgaatctgccgttccccattccctgcgatcaacaaggataaaaccgcatccaatctctgataacaaggagtcgagtaggattcgctccggcttcaacagtccatataccggaatgtcttgttcgtcattcgtttcatggaatgtatcgctttgttctgttgaatcaagtataatgacctctcccggagatagtggcggatagtgaaaactaccttctgaactctctgccatgatttcgtacaccttacggaacgccgcctcgtgcgtggcgaagtggcgtatcatttcctcgtccgacggcggcatgggcggctctccgcagcttacggcaagcaggattacaaataacaggattatgactggtgttctcattttctaatgtttaatgtttggtggctaaccgacctttcaggggagattgagccgcttgttactaatttttttattgtgtcaattcattattagttttacaacagaccaatgacatttgcaacaataaatattatcgctatgctgttctattccttctatatctatcattgggagttgtgatttctttcctttcatcacaatctcaaactcattgaaatgccaatctttgagttcttgtttttctattgtgaagccataactctgtaaaagtgttgtaagctccattataggattgcatattgatttgtattgacacatattattttttctttattagtaatgttcggcggataatcgaccttttaggagagattaatccgcttgttagcaacttcttttcgttttatagattatttcagaatatccatttggaaatgatttggtaatagtttctaaagtcccatcgtcttgatattggaatatgtgaactaaatcactaccacttttaccatcaatatcatattgtttgatttcaatatgtgtcaaagcgttttctttatagatataattctcttcacggctaccatgactaccacataactgtaaccgtttcaactttccgccctcgaaaaagttatggcatacattcatcaaatgtttaccattatcatatagaatacttttcacaagattgtctgtataatatagaaaagtgtgataaaactgattttcaatcgaacaaccaaccttaacttcgactatttgattttgattattaaacccgtagatacaaagatttttggtgttttttactgtatcaggacgctttacaggttttccttgtctgaaaccatgacgctgataggaatatggggtaagctcataaaactcgcccttatacaactcagtcctgacaacatcgctttctatttgttgtcttatgatttcaaagtcatttttcaatgcttcaaattcagttcttaaagtctcttcaatcatttccatttattttgggttgctaatgttatactatcagccgatttggctgttattttcttcaagtatcaagcctcgttttcctccaatagtagatcgtccaacgggcttttgatattgcttttgaaagtgtctgctatgtggacatacctttctgtcgtcttgatattgttatgtcccataagctctttcactatcttgatgtcggttccctgctccagcaggtgagtggcgaacgaatggcgtagcaggtgcgggtaaatccgtttcgtgattcccgcttcccaagccgcggccttcaaccgtttcgatacgatactctcggtgaaaggttctcccggtctgtgttcaaagagccacactttcggtttgtatagtctgttatattccgtcagctttttcatcaacggttttgacagcagggtgtagcggtctttttttcctttaccctgccgcacccgtatcagggagcgggattcgttgatgtcgccgggtttcagttccagcagttcgctgatgcgcaatcctgcggaatagagtatggagaacatgcagaagaaacgcaggtctgtcaccgtcacatcgagtattttctttatttcctccttgctcaacacgtcgggcagtgtcttctcccgtttggcacggttcaccttgtaacaccgccgttcctgaccgagaactttctcgtaatagaacttgatggcgttgatacgctggttttgctggcaggaggatatgtttttctcgtggatgagatacagcaggtagtcgtttatctcgccgggagtaaccgtttcaatcttacgcccctcgaaatgctgttggaaatcgcggaaataggaggtatatacccttacggtatggtcactgtaacgcacttgctgaagtttttccagatagccttccggcagtggcggccgtttgtcttcctctttacggggtgcggtttccttgatggcagaatagtctataaacgccatttttacatagcggtcgaagaactcggcaagcacgaaatcttctgccggcagataagccctgccgccgacaagcagtacgttttcttccttcgacagcgacaagcggatgtcattgtcattaccgaaagtcacttcgacaaattctctcccgtttcttatcaccggagaaagtttgatcttggtttttggggtatatatttccatgcctcacgttttgtcggatattgaaacccgttttcgcaaatttataaaaaaacacgggttatccatgcgctttattgacatttaacaatagatcccgactacctgacaaataaggtgaggagccacgaaaataccctctgccaaatccgtccttcccggcactccgtttctccgatttcctctgccctgcgccacaagcggccacttctgtgcccgatgcttccatagcctttccaactcttttacgttcagccggttccccttactttcgttcccgcatcgctattggtgctaactaaaaacactcgtaattatggacgaaaacgtaaagaacgacgctaaacaagtcatgctcgttcagaatgccgacgacggacgactacaagccgttaccggcgtggatcaggacggcaatatccagaccgccgaccccacggatcagaacgtggcgagcctgctgaacgtgaacacgcaggattcagccctcgaagccttcttcaaaaagttcatggaacaggcccagaaccccgtccacacgggtatcttcgtcatgacggagaatgccctgaacaaacttatccgcatcgacttcgacccggagatcctggaaaattaccgtatcgacccctccgaacggcttcagacgcaggagcagcggcagttcgagccgctggacgtcacgaagatagacctggcggatatggagaagaaaggtatccgcatggaggacatcgagccgcacctgaaagccatgtcttacggacataaatccaacgggctggtggagatgaaccccgaactggagaacgggatgcgtgtttccaccaaagggcgcgtgtcgctcgaagagcaggcggacggctcgctgcgcgtcgtgccgcattactggcaggaacgacccgacctcgacgcccccttccacggggtgctgctcgatgaggaggcgaaaacgaacctgatgaacacccgtcatgccgggaaagtgatcgacctggagctggagccgggcaagctcacgccctgctacgtgtcgatagacaaatggacgaacacgctggaacccatgcccgtttcgttactcgaaaaacgtgcccgcatcaaggaggccgacctctcggaaggcaagcagatggatttctacggcggcggcaaggtgttgctcgaaggatataccacccgcgcgggttataagcgggatgcctatatccaaatcgacgcggccgaacgtaactattcctttacctacgacggtttggatcgcaaccgctacgcccaggagaacaaggagatttaccgccagaaggccgccgagaaaaacggacggcaggaaactacggcctccgaacgacagcccacgctcacgattcaccggacaatcctcaaagcctccgtgcccaaagaggcttatgaccagtggacggaagcggtgaatgatccctccaagcgggcggatgtcagggctttctacatcaagggcatggtcaaggacgggcagggtgagccgttcaacgcctgggtcaagcccaacttcgagcgtaacaagatggacttcttccgctggaatcccgaccgtgcgaaacggcagggggcggaggtcaaacccgccgttgaaagccgtacccaggtcgccgtcaattccgagggcaagaccgtcgaagcggtcaaaggtgtgaaagagccgctcaagcagggacagcaggaagccaccccgacgcagaggagaaattaccgcagtaacaagaaaaacaactccaaaggcatcaaggcgtagcgtatgaaatggttctacatgcaggccggagccatgccgctcctgatcgcggcgctggccgccttgtatttccggccgggtaaacgcagccccccccggaagaggcggacgacggacggcagtattacgacgggaacggcaaccatgtctattacgaccgccggctgatcgcccgtccggaaaaagagaaagaagaacaataacaagaaaacaaccactgaaaaatccgaatcatcatgcaagttattatcgcagaaaagccctcggtggcgcgtgagatcgccgccatcgtgggagccacgaaccgtaaagacggttttatcgagggaaacggctatgccgtaacctgggccttcggccacctggtcgggctggcaatgccccaacagtacggcatcgcgggtttccgccgggaaaacctgcctatcctgccatcatcgttcatcctcctgccccggcaggttcgggagggtaaagagtataaggccgacccgggtgtcgtgaagcagctcggtattctccgggaattgttcggcatggccgagcgcatcatcgtcgcgaccgacgcggggcgtgaaggggagctgatcttccgctacatctactcttacctggaatgccgcacccctttcgtgcggttatggatcagcagcctgaccgaccgggccattcgcgaggggttacaacacctccgccccggcaacgaatacgacaacctctacctctcggccaaagcccgcagcgaagccgactggatcgtcggtatcaacgcctcgcaagcgcttgccgtggctgccgggcggggtgtctggtcgctcggacgggtgcagacccccacgctggcgatcatctgctcccgttacctggagaacaaggcgttcaagcccgccgcctatttccggctgaagctctccacggcaaaggagggcacggagttcaccgtcctctccacggagaaattcgacggcagggagaaggcggaagcagcccgcgccgaggttatcggcgcccgaacggtacgcgtcgtgaacgtggagcgcaaggaggccagggaacagccgcctctcttgtacgacctgacgacactccagaaagaggccaacagccggtatggtttttcggcagaaaaaacgctcgacatcgcccagtcgctttacgagaagaagttcatcacttatccccgtaccggctcacgctatatatcggaagatgtggccgaggagattccggcactcatcgggaacatgacacgctatccccgtttcgcggaatacgcgggcaggatggataccgcatctctctcccgccgaagcgtggacaacgaaaagatcgccgaccaccacgcgctgcttcccaccgagaacctcccctccgaactggatgccgaccaccgcatcgtctatgagatggtcgcggggcggatgctcgaaaccttttccggggcctgcgtgaaagaaaacactttccttaccctgcaaagcgcgggacatgatttcacggcccgcggcagtatcatggtcgagacgggctggcgggccgtcctgaatgaacctgtcgaagagaaagaggaggacatgaccctccttcccgacatcgtgcaaggcgacgagctgcccgtcaaagaatgcggcacggaacagaaacagacccggccgcgcccccttcacacggaatcaagcctgctggcggcgatggaaaccgccggacgcgaactgtccgacgaggccgaacgcgaggcgatgaaggatgccggcatcggcacgcccgccacccgtgccgccatcatcgaaacgctctttgcccgcgagtatgtcaggcgagagaaaaagtcgcttgtacccacggacaagggactggccgtgtatgccgtggtcagggacaagaagattgccgatgtcgccatgacgggcggctgggaactggccctctcgaagatcgccaccggggagatggacgccccgacgttccatcgcggtatcgaagtcttcgcctcgcaaatcgccaaagaactgctggaagcaagaatcgacgacgcggagagtgacacagcctgcccgcgttgcggcaggcccgtggtgttctatcccaaactcgccaagtgtcagaatcccgattgcggcctgaccgtatggagaaccgtggcccgcaaggagctgaccgacaagcagctcgcggaactgctgaccaaaggcaaaaccggcacaatccgaggattcgtcaaaaacggcggcgggacgttcgacgcggccctcacgctcgatgaccagttcaagacctcgttcgttttcgagccgcgcgatactcccaggcagggaaagaggaacaaacggaaataatcgttacctttgccactggaaaagacctgtcataacgagatacgcttgtttgataaggattttttcagtggtcggcgcttcgggtgggaacccggggcgcctttctcttccccgattatcaacgaccactaaaaattcttatcatgccagacaagcaacaccatacccccacgggggaattgtcctattacggactttcgttactatcctacctcaaggacagccacccggaactcatcgccgaaggtgaattcatcgccgagcgggccgacagcgccgcccaagcgtacagcgaggcgatccgttcgggctgcaaccacatcgaggccgaagaaattgcccgcgaggaactctgccgcggactgcacttttcaccctacaacacgctggtaaacatcctctggagggaattcgaggcggagattcccgaggataccgcccggcaggcggctctacgcctgctgcccctctgccgcggagtgctggagaagtacgacctcacggacgacttcgccgacacgcccgactacgaactgttctataccgaactgacgggaaccgtccaaatacttctcgaagatggcattcaataagaaaacccacctccgccagaatatcgacgcgctgaagacggccttcacgctcgacagggaacggcgggcgccgactcccgaagaagaaaggacactcggcgcatacagcggcttcggcgccatcaaggaagtgctggaaaaccccaccgggaaaccggacaaggacggcatggcaacgctcgtggccgagttgcacgaggtcatcagggcgaacacccccgacgaacgggaatacaagcgctacatggacgggatcaagaactccgtcctgacggctttttacacgcccccgaaagtggcagacgccatcgtggaggcgatatgggatacgcggatcgccccccaacgtattcttgaccccagtgcgggaacgggggttttcgtcaatgccgtggatttccacgacccctacgcggagatcacctgcttcgagaaagaccccgccacggggttgatcctgaagcacctgcaccccgaaaaacgggtgcggatacagggattcgagcgcatcgaacccaaatacgccggttactacgacgtggccgtgagcaacatccctttcggggacgtggcgctcttcgacccgttcttctccacccataccgaccccgtgcggcggcaaggcacacgggcgctgcacaactattttttcatgaagtccgtcgatatggtacgcgagggcggcctggtggcattcatcacctcgcagggagtattgaacgccgagcagggacgccccgtgcgcgagtggctgatgaaccgctgcgagcccgtatcggccatccggctgccgaacaacctctttacagaacacgcggggacggaggtcggcagcgacctggttatcctgcaaaagaaagccgccatgggggaactgtccgaacggcagcgggatttcatcgaatcccgcaagctgtcgaacggcatccggataaacaaccttttccagtcgttcgacagggtgatccataccgaggccaaagtaggcaaagacccctacggcaaaccggcgatggagttcacccacgcggagggcgtggacggcatcgaccgggagatgcggcgtatgctctcggaggatttcaaccggcatttcaacgagagttattgcctggaacatgctccggaacagacacccggtacaccggagcgggaattgtcccgtccccgtcaggcggaacgccagcgtgccgaaagacacgagccccgccttgccggagaaatcgtcaaggagattatcgccgacgcccgtaaccttcagcagcagcgggaagaggaggaaaaacgccgcgtcgtcgccgaaatggcggcgcagggctaccatgtcgataccgaaaccggggagattacccgaatcgaaaacaaacccggacaagcgttaccggattctgccgccacacccgccggagaaccgaccggggaggatctggccgacttcggggcctggtcgaaggagcgggagaatcgcttgtgggagcagcacccgccgaaacccgaagatttcggcatggcggatgctcccgtgcagcacgtgggcggaacaacggaaccgaaaccgcgggagggcttcgccgggtcgcttttcgacacggtggaaacggcggctcccgcacctgccacccaagctgccgaaccggtaaacgtgcagcaggaaccgttgctgacgctctacgatctgttcggcttcagcgccgaggagcggcggcaggcagaactcggtatatccaagaaaaggaacagccgccggggagcaaagcggaagacgccccgacaaccctcgttattcgccccggcctcctctccggaggaacagaagagcgaaatgccgaaagcgacgccaccggagcgtgatcccgaagacttgtatgcctccctgaactgggaggacaacccgccgatcaacggcttttacgagatgatgatgtcgcttaccccggaacggagggcggaattgcgccgacaaagcgcccggcagcaggaaaccccggaacagcgggaacggcaggcggtacgccccccgacggaagccccgaaagacaaacggaaacaagccgtcggtacgccgagaacgggcagcttgttcgacacgccggaaaatccggaggaggaagaacccggtaaagaaacgccgcagatacgggaggcggatatgaaaccccgcccgttcgagggtgaggtcgccccctatttccgcgaggggacactcgtcacggacggacaaaaccgggtcggctacctgcgggggattgaatccctgcaacccatgttccacccgctggaactcacgcctgcacaacggacgaaagcctccatgtatatcgagatacgcgatgcctattaccacctttataacaacgaggcggaaacgctgacggcgaaccccgccctgcgggagatgctcaaccggctttacgacaatttcaccgaacgcttcggacggctcaatgacaaacgcaacctcgacctgatcaagatggacgcgcggggaacggagattctatcgctggagcgttacatcgacggcaaggcacgcaaagccgacatcttcgagcgtcccgtggccttcaatcccgatgagatcacgcacgccgacgacgcttcggaggcccttgtggccagcctgaacaagtacggccgggtggaaccgcactacatggcctcgctcacgggaactaccgtggagggaatactcggggaactgaaaggacgtatctattacaacccggaaacggacggctacgaggttgccgacaagttcatcgccggcaatgtcatcgggaaagccgaacggatcgaggcgttcctgcgggagaatcccgaccacgccccggcccgggaatcgctggaggctctgcgcgaggcgacgcccaaacccatcgctttcgacgacctggacttcaacctgggcgaacggtggattccaaaaggtgtttacgagcgtttcgcctcttcgctcttcgatacggaggtgaagatcaccttcgcctccaacctggacgagtacggcgtgaaggcggaagcgacgaacgtgaagatcacggagcagtatgccgtcagcgcgcagacccgtaagtacaacggcctgcaccttttgaaacacgccctgcaaaacacttcgcccgacatcaccaagaccgtcctcaaatgggtggacggcgaacggcgggaggtcaaagtgcgtgacggggaggccatacagctcgccaacagcaagatagacgagatccggggtgctttccccgaatggctgcgcgagcagtcgtccgacttcaaagaccgcctgacagacctctataaccgtactttcaactgttacgtgcgcccgaagtacgacgggacgcaccaggaattccccgacctcgacctcaaggggctggggatagacaatctgtatgacagccagaaggacgcgatatggatggacaaactgctcggcggagggataatcgaccacgaggtgggcggcggaaagacccttatcatgtgctgcggagcctacgagaagaaacgcctcgggctggccaataaacccatgattatcgggctgaaagccaacatccatgaaatagcccggacgttctgcaccgcttacccgatggccaaagtcctctacccgggcaaggaggatttcacgccccggaagcgtgagcgcatcttccgggagatacgcaacaacgactgggacgccgtgatcctctcgcacgaacagttcggcatgataccccagtccccggagatacagcaggagatattgcaggccgagctggactgcgtggaggagaacctcgaagtgctcaaagcacaaggcagggacgtttcccgcgccatgatgaaagggtgtcagaaacgcaaggccaacctggaagccaagttgcagaaggtggcgcacgcgctggaaacacgcaaggacgacgccgtggacttccgcctcatgggtatcgaccacctctacgtggacgagagccacaaattcaagaacctgactttcacgacccggcatgaccgggtggcgggcctcggaaatcccgaggggtcgcagcgggcgctcaacatgcttttcgcgctgcgtaccatacagcagcgcacgggccgcgacctgggggcgacgttcctctcgggaacgaccatctccaactcgctcacggaactgtacctgcttttcaagtacctgcgcccgaaggaactggagcgtcagaatatccgcaccttcgatgcctgggcggccatatttgccaagaaaaccatcgactacgagttttccgtgaccaacgaggtcgtgcaaaaagaacggttccgatatttcatcaaggttcccgaactggccatgttctactccgagattacagattaccgctcggcggaggatatagggatcgaccgaccgcaaaagaacgagatattgcacaatatcccgccgacaccccagcagacggagttcatagaacggctggtgcagttcgccaaatcgggcgatgccacgctcctgggccgcctgccgctctcggagcgggaggaaaaggcgaaaatgctcattgccacagactacgctcgcaagatgtcgctcgatatgcgtatgatagaccccgaactatacagcgaccacgtggacaacaaggcgagccactgcgcccgtatgattgccggttactaccgccgtttcgaggcgtacaaaggtacgcagttcgtattctccgacctgggaacctacaaacccggagcggggtggaacgtctattccgagatacggcgtaaactcgcggaggattacggcataccccaaagcgaggtgcggttcatccaggaggcgacctcggaaaaagcgcgcaaggagatgatcgccggtatgaacgccggaaaaatccgcgtactcttcggatcgaccgagatgctcgggacgggagtgaacgcgcagaaacgctgcgtggcgatacaccacctggactgcccctggcgtcccagcgacctggagcagcgcgacgggcggggaatacgcaccgggaacgagatcgccaaactccatgccgacaacaaggtggacgtgatattatacgccgtagagaagtcgctcgacgcctacaagttcgggctgttgcacaacaagcaactgttcatccgccagctcaagaccaacaacatgggaagccgtaccatcgacgagggggccatcgacgaaaagagcggcatgaatttttccgagtatgtcgccgtcctctcgggaaatacagacctgctggacaaggcccgcctggagaagaagattgccacgctcgaaagcgaacgccaggcattcgtgcgcggcaaatcatcgagccgctacaagctggagcagatcacggagaagatagagaagaacaacgacctgatacggcgtatcggcaaggatctggaacacttcaaggcccgcgtcgagttcaacgaggacggctcgtaccgcaatcccgtgaaactgaacgggctggaaacctccgaccccaagctcatcgggaaacagctcaaccatatcgccgaaacggcacgcacgctcgacaggctcgaacccatcgggagcctctacgggttcgagctgctcgtccagagcgaaacgaccgggaaagacgggctcgacctggtgcagaaccgtttttatgtccggggtgaaggggattatctataccagtacaactacgggaatatcgcctccgacccgcgactggcggcgatgaacttcatccacgcgctcgcgaccatcgagccgacactggaaaaattccggaaaaagaacgaggaactggagaaagatattcccgtcctgcgggaagtggtggaaagttcctggcgcaaggagcccgaactgacggccctgaaagctgacctgacggaaatagaccgcaggatacagcaaagcctcaaaccgatagaagagagcgagggaaaggaggcggaggaggataacgacgtgtgccgggaacggcatgacacggcggaagagctcccgaaggaagacaacacggcggcccgtattccttcccggctgcggcagattgccgacgcctccggggggcgcatcgtgatcgcgggcgtgggcagcccgccggagaacggccctgcgaagaaagggatcaagatgtaaacgaaaagccgacggaagtacagatttccatcggcttttttcatatgtccgtgagcgttgtcgtcacacttcctgcaagagtgtttgcagctcctcctgcgtgggaagataggtcatgtactgggcggcgaagacctgcttttcatcttcgggcagcgtataacggacgaccgcgtcgtttttctccgcgcagaggacgatacccaccggagggttatccccgggattcatcaactcacgggtgtagtaattgacatacatctgcatctgccccaaatcctgatgggtcagctccccggatttaaggtctattaaaacgaaacaacgggccaggtaattgtaaaagaccaggtcgatgtagaaatgcttgtcatcgaaggagatacgcttctgtcgcgcgacgaaggcgaagcctttcccgagttcgagcatcaagcgctgcaagcggctgatgagcagttgctccagatcggtttccagaaaatgctctccctgcgggataccgagaaactccaggatatacgggtcgcggatgatctctttgggttcgacacgtccgggttcggtacgggaaatctcctctttcacagctttcttgtctcggctggccagcaggcggtcatagaaaagcgtgttgatttggcggtcgagctgccggacactccagttttccttgacgcactcgtgcaggtaaaaatcacgggcggcatcgcccgacaccttgagaagcgtgcggcaatgcgaccaactcaatttatcacacagcgtgtgatatttcgggtagcactggtaaaactgcctcatgtaccgcaggttggtggccgtgaacccgtttccgaactccgccacgagccgcctggaaagggtgttgatgacagccttgccatatccggcacggtcggttccctgctgctcgtactccactatatatttccctacctgccagtaagccctcacgagggtcgaattgacatgatgtatcacctttgcgcgcgcttcctgcaagatatggcgcacgttatgcagcagctcttcctcccctttgtcggcaggatgtattttatctgtttctttcattgttcattattatataggcttccaagtgcaaacatactgattttacggcaaatatcgagcggttgcaccgtcttgtcgtgccttattccatgtatctccgcgtttttccatgacgccggactctcgggacagggcctaaccggaatcggcaggacgatcctttttcagcttgcggaaattactgaagttacgctcgatgaaccgcaggacgtccgattcccggtagaaggtcttgtgatagatcatctcgtaaggcagctctcccgaggtgcggtaacgctggagtgtgcgcttgctgatattgagcatacggcacaggtcgtaattgtccagaagacgctccccgtcaggcaggatggaaagcggttgctccacgtcccccgcgcacagcttctcgatacgttccagccgttccgagagccgctgcatccatccgtcgaaatattccttgtccagaaacatggcctactcctttggtcggttcttgcgccgcacggaacgctccttcagcacacggcggatttccgtgagggaataatacagcttccggttgatggccgaataggtgatcacgtgatccgagcggaggcgttgaagggtacgcccgctgatgcccaggtaacggcagacctgctcgccgtccatccattcgtcgtttatatactccttattccatgcacgccccttttcagggagagaggcgattgcagcctctattttctctatacgcccgacaagctcgttataggctcgcgaaccgatcactatgattttcatactcctttgttttttagtctgttacaaaggtcgggcttatatggacagcttaaaacgaggtcggtacgactttttttgataatttacagtgaactgattctcaacggttcatgcggtgaagaaggcagtgttttttaccgaaatccgcggcccgtactcggtatttttattggcagaaatgcgatagaatactgtgattcaacgcttaacggtgttttaatccggacggggctacaacggaacacccgtatcggctccttatacgggtgcaaatacgggtgttcggaaagttcctttcgagagttacggggaaaaaccgacctcggttcttttgttatatacaacgctgattatcagtatttctataaggaatagagtgctttaccggttcatgttctactcggaattgccgtttttcttgtttcgcttccacgtctgcatacgtttaagcagggcctctttcgccttgtcaagccacggtgttgggttgtttcggattttcatatcgcagaatgtcctcgaaaggttcatgtcgaggtgtacgttgaaagcgttggaaatgtagctggcaagttgcgtgagtggcacattgccgaaacagcctttactgtcgagcaggtaaataagttccgtcagatccgtcttcgagtcctgccatgtcggacgcacgtcagacaatggcagaaccatgttccggaggttcgtgctctccagtgattccaattcgcccataagataaaccgacaacatatcgttggccaggattttcgccaccttgaaatccgcgtttgtcgaaaactgcgggtcgagttcatagtagaaggtttccaggtattgctccgtgtcggtctgcccgcgcaggaaatagaggctgtccaggtgtgtagcgccgctgcggaaatagcggataaagtcgaggcgtttctgcgtgtacgcgttgatggcccgaacatgggcgtccaggtactcccgttgtgcctcgatacttcctaccggacggttcatctcgatattgtagagcttgcggtaatagatcagacggcaaaaaagacgaggtttgatttctttgaagaactttatttcctcgtcatcgttttgaaaacggtagccgatgatatattgtttcaaacggtcgaacgcttctcccaggacacgtgacgcttcaagcgactttttcaacacgtcggtatcccgcgattcgatacgttcgatactccgcaggacttcgctgtttaatttttctataaatgcaatcataatccgtcttgttactttcgcgtataaagttagcgaatcgaaaaaccggtggattacgatttttatctttctcttcgtttttttatcacggagccgattttaatgtcaaatccggctttcctgacggatggaagtgggattgctccccatattccgcttgcaaaagtccgtaaagtgggattgggcggagaaaccgcacatgtaggctatttcctgcaacgtgtagtgtgtcgtccgcagcaactccccgatacgttcgatacggcgctgacgcaaccacgaggaggccgagcagccgaaaacccgctggaaacgccggcggaaggtaatcgtgctggaatacccgcaaaccccggcgagttccgtgacgttatccgaggcaagataattcgatttgacacgggagatgaactcgtaatcgtcccccaggtgcaacagctcctcgaactccccgacatcggcgggagtgagatgttcataagaggcgtcgagcattttcagcatgacagcagcgttacattcaacgggcatacccaatgtcttacgggcttcacgcaggtaattcttgaaccgcagccgcagcgtgtcgtgatgcgggtaggaacactgggacagaatggtgcagaccgtccgcagttcatcgacacaacagtagccgaaataccacgttacaagacgctcgacgtaatggacggcatgaaattcctccgaaagcatcagaagaagcaggaacggggtgaaatcctggtattcccccgttatgggacggggtgcttcgtcaagcaaggaggcgatgtcccgcatcagcagagaatctcccgagtacgcttttatttgttcggaactgcgggcataatcccggtaacgcgatatgaccgccgacaaagcattgaacttcacggcgtgaacgccttctataaaggaagggcgaagactgttgtaaatggataagtcggtttgcataagtcatttctataaaacggagccgcatccccttgttgccaaagctccgcaagtcgttacttatgaaccgcttggaacacggtacgaatcctaattacaaatatatcgcatccgacaatccggaacaaatatcagcaggcaaaaatgaaaataaacctcgttatttttgatttttacctgcaataatattatatttgcaaacaaataagagttgtttgacagcatgagaaatatagtgtatcaaagcactttaccaatttcttatccgttgcctattctcatgcgagtttcttttaatctatttgtagtcaattaaataccttcagactacatcaaatatacaaaaaaaagccgcaacccgaaggatgcggctttcaaactatataatcttgattgattagcagtttacagatgccatatgagcgatcaggtcaagaaccttgttagaataaccgatttcgttatcataccaagaaacaacctttacgaatgtatctgttaaagcgataccagctttagcatcgaagatagaagtacgagtgtcacctaaaaagtcagaagaaactactgcatcttcagtataacccagtacgcctttcagttcgccttcagaagcttccttcattgcagcacagatttcagcgtaagtagccggtttagccaagttaactgtcaagtcaacaacagaaacgtccagagtcggaacacgcattgacataccagtcagtttaccgttcagttcaggaataactttacctacagccttagcagcacctgtagaagaagggatgatgttgccagaagcagcgcggccacctctccagtccttcatagacggaccatcaacagtcttctgagtagcagttgtagagtgaacagttgtcatcaaaccgtctgtgatcccccacttgtcattcagaacctttgcgataggagccaagcagttagtagtacaagaagcgttagaaacgaactgagtacctttaacatatgatttttcgtttacaccgcaaacgaacataggagttgcatccttggaaggagcagacataactacatatttagcgccagcttcgatatgagcctgagccttttcctgagtcaggaacaaaccagtagattctactacgtattcagcacctactgcatcccacttcaaatcagccggattgcgttctgctgttacgcggatttccttaccgtttacgatcagcttgctgttttcaacgtcagcttcgatagttccgtcgaactgaccgtgcattgtgtcgtatttcagcatgtatgccaagtaatcaaccgggcaaaggtcgttaatacctacgatctgaatatcgcttctcttttgagcagcacggaaaacgaaacgtccgatacggccgaaaccgttaatacctactttaatcattgtaataaaacttttatgggtttattaaaaatattacttatctccaatttaacttaacagccgcaaggaaaatatattcgtagcacactgtttttaacgactgcaaatttagtcattttttttattgtacaggaattaggacaagaaaaatatgccctctaacataaattaattgttgcagcttatttctttttcttgaaaagtttctttattatccacgcctggactttctggatgccccaggctgtcaataatgggcgtgcaacatcccatgcaacaggtaataagccttgtgccacagaaagatagtcggcaaatccaaacgacatggatggcacttctgaagtatgtacaggctggttgctttccgttcctttggatttggtttttgtgttagggaataagagagcggagacacctgaaagtaacaacgtgccggcgttctcttgtatgtaagagaaatcagcattcaatttctgttcctgtatcgtacattcctgttggatgcggcgacggtcagaaatcagtttctccagtggtgtcggttgcggattgttcattgtctgtcgcgtttgttttatcatcatttgttgtcaatgcggagatcacaacgtttaatactttattgctgattctgcctttgttcatgacaataataccgatcagcagcagatagagcacggctaccacgccgaatcccgaacctaccgaaccgaacagatcccccaagaaaaaacctaatgcgaggaaaatgaacagaatcgcaaagaaagccagaaataataaaataacaccatacgagagaacggcaataacctttcctgttctctcatatgtgtttaattttaggagttcgagcttcaactccacgtaagccgaaagatcttttttcagttcacggaagatttcacctgcgtctttctccatacaaaattattctgctacgatttcttctgtagtttttgcaatttcagcttttccttctttgtatttagcaagagctgaattgaagccttcttttactttaccaactacaccattcaattcttccagtagttgttctcttttatctgttgctgccagataaccaactgcggcgccaacggctgcaccaactactaatcccagtaataatttagaatctacgtttttcataactatttctttttataatgttgctactaagataacgaatatacttgaatgatggtttatttggaccttaacttttagggttaattaatgttattgtttctggactttcaccgcagcccaattattcttctctgtgtgcgataacaatgccaatccgttatgtttgcattcttcttcgatggccggaatgtcttgtacatagaagccgctcatgtaaaggaaggctcctggtttcatacattcgctgtaatggcggatatcattcagcaggatattccggttgatattcgcaaacacgatgtcgaaggttccgaatgcagggatctgttcggctcccccaagggcgacctggatatcgttcgtgttgtttagacgtatgttttcgagtgcattattgtaggcccattcgtcaatgtcgatggccaccacgcgtccggctcctttcatatgggcaaggatggccagtacggctgttccgcaacccatgtcgagtagttctttgctggtgaggtctaatttgagtatttcgctgatcatcaggaaagttgtctcgtggttgccggttccgaatgccatcttcgggtcgatgatgatattataggcataacccggctcatgttcgtggaaggaggcgcggatgatgcaatccttgccgatgcggatcggcttgaaatagttcttttcccattcctcgttccagtccttgctttccaccaatgtttcggtaaaatgaatatccacgttttccagtggaaattcggcaagtttgtcctgcaatccttttacattatataattggtcggaaatatacccttgtaacccattttcgttttcggcaaaactttcaaaaccgatttctcctagctcggcggccagcacgtcgttgataatggaagtctcgacaggggaggtgtatgtaaatgtaagttcgtaataattcatatcgttctttctttatagattccttctatagacaaaagtatatattttatcttgatgtttcacatttcattcgatacattctttatttatgtgtaagaattagtaaaatatccagtagccttataaaaaacccttttggtacacccatataccaaaagggttttacttcctgatttttgataatcagatgtctcttactaccatcctggattttgaatcaatgttggagtgcgagacaattcatcttgcataatcggccaaaaataagaacgagggctatagaatacacgtccgtcatttaccgcaatgcgtttcatcttataccgtttcccgtccacttcaatttttccatttggatcttctacaggcttcatgccgtgtgaacaacgttggcttttagcatacggccaactctctggtccaatatagtttttttctttggctaactcaataggatcatctgattccatatataagcgtgttgcccaatagcgccaattctcatagaataattctacacgacgttcgcgttggatatattcttgcatcaagtttgcatcagttaggacagctggaggcatcggagccatgaaagaacgttcccttacagaattgactaaatcatagatttcttgtgtggggccacttactttgttcacagcttctgcataaatataaatgaatgtcggcagacgccaaatagcaggtccgttgatcacatgtccacctttgtttctatcccatccgtctttgaacagttttctcaaataataaccagagtgagaagaggcttccaaataactactgctcacggcatctttgccttcggctgtattcaattgtttaccaccataccaagaaccatgataacggatatcacgatagaaacgcggatcacgttttacgctttcataagggttttcgtcatcataaccatctattttagctcggctatcataaatagggtagccatatccgtcagggcttatgtattcatattcgtcgacttgttcctgcagaggacgttgacgggcatgaccattttgggaaggaggcaagacatcgccagaccagcccgtatctttatcacgagtggtaaaccaaacccattcctgttgaatcgcatccatgttgtaaaacatttgccatagtcgctcttgtacttttccattgtttgtattggcattgccatcaacgtctttaaagtcatctgcatccattgctgccggtgcatataatttataccgaatagctccattgacatctttcgcttccaatacatcttttgctgcatcgcgagctgcttcccagcgtttcggatcataagtagtatattcatctttgaaagctcgtgtgtcgtttggcaacgtcccgccattccacaaaggggttgcagccatccaacggacaatcgccttcaatcctaaacaagctcccttgtcgacacgaccaaaatactcacctccgtaagaggcgtctaccttttcataagcggcatcggcatcggcacaaatcttttcgaccatactatgaaaagactcttttacatacgccatatcttcacctggaacgacaacatgatccatatatactccttcaccataagctcggattacgagatagtgcaagtatgcacggaaaaataatgtttcacctaagcgacgttctaagtcgccttcccgaccgtctttggggttatctggagtattgtatttttttacaccttccaaaatgatattggcacgtcggataccattatataagtcccaccagtattgtccgcaactactgttgtttggcataccttgtgaaggtccataattcccaatgttgaattgatgcggaatggcttgttcatggctggaagccgtacattcgtctgtcaatcctgcagagccgaagtgattcatgaaaatcagcggtctatttgcgaactttgctcttgcatacaaatcggtcaccaagttatcgacttgttcataacgagtaaatacatctacctcatttttcttatcatcaggcattctgtccaagaagtcgtcacaagatgaaagagacaggagtaatactccaattcctatgattgatttttgtaatttcattttcaaaagatttaaataattaatatgtaatttcgacaccaaaattatagactctctggatcggataccagtcaccggagccttctttcgtttcaggatccatgtcgacatcatccaaactgtcgaatgttagtaagtttaaaccttgtacataaaagcgtacattttgcaaacctgcaaaacgaattatgtttttgggtaacgaataccccacttctaagtttttcaaccggatataatttgcattgtacaagaataaactgctgttcccatttttgttgttttcataagctccgtatgttaagcgtgggtaagttgccacatcttttgtagcttctgtccaacggttcaagtgcatgtgtttcactttaccatattgatcttgttcgtaggatggaaaatcccaaactgcggctccattcaacaatatgctggagtttaaagagccttgaaacattacgctgatgtcgaagcctttatattgtattccaaaaggaataccaaattgtatttccggtgtacgtggaaatcccatatgtgttcggtcgccatagtcatcgattttaccgtcttgattcaaatctttatatacgacatcacccggatgtaattcgccccaaggctggaaaccacgaccgtcattcattgcattcaatttatccgcttctgcttgatcatatacaaagtgatcgactacatatacaaaatgttctcctaatcgccggccggtcttttggcgatattcatttccataatcaacttcattcatgaatttgatcttattacgggcgaatgtgaaattgggtttgatataataacggaaatctttaccgattgtggagttccaacctaactcgaaatcaataccctgattgtccacaattccagagtttacaaatggagcgtcttttcctactatgtctggatatcccatcttgtcgccatcgcttagtgttgtgataatatcgtatcgatgttctctaaagtagtcggcagcaatagttaacttcccattgaatagggtcgcatcgaaaccgacattcgttttacgagctttttcccaagttaaatttgggttggcgaagttcccttctttcagcccatcgtatccagagccaaactcattaaagccgaaactgtagccatcacctccttggaagaattgaaggtaggcaaaacgatcatcgttattatctgaaattttatcgcttcctacaagaccgaaagaggctctcaactttaaattatccaaccacttctcagttcctttcatgaatgcttctcgagaaatcacccaaccgatagatcctgccgggaacacaccgtatcgattacccggagcaaaattttcagatccgttgtagccaatattgaattcagtcaaatacttgttgtcatatgcatacgttgcgcgcccactaataccttgataccgatattctactcgattatcataggctcgtgatgagcggttgaatagtaccatagcggaaacattgtgtcgatcgaactcacgttgatagtccaattttaattgatagtaagttttgttttccgcggcattgtgactaaaaccattactaatcgtttcgtctgtactataccaaggattacctaagcgataagctcctgcataaggttccgtagaatgcaaataataagagccatatacgctttcatccggttggaaagtagcatatctaccatagttcgcataaccatcttgacgtgtttccaacacacgccgtatccaacgaccttcttttgcgtcatacgagatactaccttcaacttttaatccttttgtaatgaaatccaatttgtgaccgattgaaaacgttccattcaaaaacgtttttttctcattcaaatatccggtacggcttaattcacctaagatattgtaacgatgttgctggtcaccatagagcatacctttcggattgtttaaggcataggtttcattggccgcattaccattgtcttgtagtgtaataggtaaatgaggtggttgcgtatttgcaatagacactacccggctagcggttgtacctggggcattacggtcggtaatgcgtgcacccaagtcgaccttaacataaaagttctttgtaatatccacatctacattcgcacgaaaattataacgctgaaatacagcttgtgtgctataatccgccatgtccgtatgtttgtagttaccgtcttgcttataataatttgccattacatagtaacgggcgcgttcggagccgcctcggacagacaaactataatcctgctgaatacctggtttgaaagcataatcaaaataatcccaattatatcctttcccatttttgaaatcttcgataacatttgtagagaatagatctggagaagatggatctacccccatattcatgcgagcttcgttgtaaagttcagcatattgagctgaacctaaatattcagggaacttagcaggagagtttgttccgactgatgctttgaaactcacggatggtttttcggacgcttgtccacgcttagttgtgattacgactacaccgtttgctccacgaattccatatgcagccgttgctgaagcgtctttcaaaatagtaaatgtttcaatttcttctggtgctaaataagccatatcatcgcgttccacaccgtcaatgatgaagatcggtgtctggtctccatatgtagaggctccgcggatgcgcaagtctgctccatcgacacccggctcgcctccactgaattgatttgccatcagacccggcatacgtccggccaaggcatttgttaaattagctgtcggactttgtttcaaatcttttgtggtaatcgttgctacagatccagtgatagttgctttccgttgtgttgtatatcctacaacaacgacttcttccaatgccttggcatcttcaaccattttgacatttacaattcgttctcctttcagtgaaacttctttgggttgatatcccacatacgaaaagactaaagttgctttcgaataaggagctacgatttcaaaattgccgtccatgtcggttattactcctgtcatggttcctttgaccatgacattcactcctggtaacggaccgacattatctgaaacctgtccttttactttgaaaccttcttgatttacaccgtccaatttggttttggttgtgccgaccaagggaactacttttttgtcatctacgccattgctccccatattgactttaccatccaccgcaaaagcacaggtagtcaaacaaaaaagtaacccacaagttactttcgaaactcgagacaacgagttctttcttcctattggaagattacaattctgtttttgcatcttttcatgtattgctttaattgttaactaaataaattatataccaagtgaaaacttgatatcggaatttttaaaaacacattttatatcataggcctttttgttttaattaaaaaaatcttgccgtagttcttggagaactgagtacaattatataatgcaaaagtattataaataaatatttatcaaaaacacatctaaatatttcaatacaagatgatctttccttgttatagtatcttatatcggctgtaaagttaaacaaaaaacatgaacataaaaataaatattattaagattaatatatttaacagtaaataaacaatcaagattttggttttgcagaaaatcagttcttgccacctcaacgggcaatttatataacagtttttggttctttatcaatttaggaatccttaatttacttatattctgctattcggctacatgaagaaacatgtcattttctgttttcaaaattcatttaaacctcttcatatattgaactttgattgttgggcgttacctctaaattgacgaagaactaaatccttattaaagaaatgtgatatttgatcgcaattttagcaagatcagtttttctctctgattttctattgaaccaacaatataataatctcttttaccctctcctaattgtactcagttctccaagaactatggtaagagttttttcagaatagaagaatctggtctcactcattaggtatttctgtttggctaaaatttatttgaacagaaagaagttagaggtttatgaaactcttgtagatataagcctgagggaagtttgagggaaaagtattgaaagatactgatgcaatacagggaaatcacaccgaaaacccatcaagtgtaaaatcatctctataaagattttgcaaaataaccatcatgtaatcatagtttctctttagatgttgttgggagtggcttgtagtgtttttatcaaaatcataagatataaaatcatttttagaaatggtgtctgtgaagaaatcgtttcctttgaaaacaaagtcatgctattaacagattaaatcgcaacgatatgaaaaagacagctttattgcttctggtcgctttggtcttaggatgggcgggatgttcgtccgattcgaccgtcgaagtgaagaacctccggttggagatgaaagaaaatccattgggaatcaatgtgacgcaaccccgcttttcctggcagattgcttccggcaaaccggacttgaaacagacggcctatcagatacaggtggctgcttctcctgaacaattggaatccggtgacgggcttttgtgggattcgggcgtggtccgttcggacgagtcggtgctggtgccatatgccggaaaggcgctggaatcgggaaaaccttactattggcgtgtgaaattgacgaccaaccagggggatactccctggagcgatgccggcagctggtcaatggccttgctcgatgattcggaatggaaagcgacctggatcggcgaagattccctctccaatccgggtgaggaggtaggagtggccggcggaaacaataaaacacgcttggccgcccgatatctgcgtaaagagtttacgacggatagggcggtggaaagagccgtcttgtatatttccggccttggctcgtatgaggcttacctgaacggaaagaaagtcagcgaggacgtgtttgccccgatgccgtccctgtattataaacgtatatattataatgtatatgatgtgacagctttgatggcttccgacaagaatacattgggagtgattttggggaacggccgtttcttctctatgcgtaatccgggaatgaaaacattcggcttgcctcgtttgcttgcgcaacttcggatcgaatatgcagacgggtcgcaagcgacggtcgtcagtgatacgtcttggaaaatcacttcgaaaggaccgatcgtcgcaaataacgagtttgatggcgaagaatatgatgcccgcctcgagatggaaggttggaacacgaacggtttcgacgacggcgcatggaaaactcccgatgtgatggaggctcctgcgggcaaactgacagcacagcagaacccgaatatccgcgtacaggaaacgttgaagccggtagccgtttttgatcgtcccgatggaaagtatatcctggacatggggcagaacatggtcggttggctctctgttaacctgaaaggaaagaagggcaaacccatatcgatgaagtttgccgaattgttgcagaaagacggctcgctctatctggccaatctgcgtactgcgcaggtgaccgacatttatactccggctgaagacggtgattttagttggcaaccccgtttcgtttatcatggtttccgttttgtggaagtttcgggactcgattataaaccggaactgtccgcgtttaccggacatgtcatttatgacgagatggcgacaaccgggcgttttgaaacatccaacccgctggtcaaccagatccataagaactcttattggggaatccgtagtaattatcgcgggatgccgaccgactgcccgcaacgtgacgaacgtctcggctggttaggcgaccgtgcgacgggtgcttacggcgaagcctttattttcaataatgcccagctgtataacaaatggttgcaggatatcgaggactccatgagcccggaaggaagcatctcggatgtctccccgaattactggacgatctatgccgatgatgtgacctggccgtccgccttcttctatgtggcggatatgctgtaccgccagttcggcgacgacagcgcgatccgtgcccattatccggccatgaaacgctggatggcgcatatggaagaggcgaccatgaaggactatatcatgacgaaagaccagtatggcgactggtgcatgcctcccgaatcgcaagaactgatccattccaaggatcctgcccgcaagacggacggcgctattctcagcacgactgtctattatgatttgctgaacaagatgatcggcttcgcccgtatctgcggacaggatgccgatatctccggctacgaatccttggccgctaaaataaaggcggcttataatgccaaattctttaataaggaaacggcggagtatggcaataatacggttacggccaacattctctcattgcgtctcggacttgtgccggaaggatatgaagggaaagttttcagtaatattgtgaaaaagacggaggaggattttaacggacatgtaagtaccggagtcttgggaatccagcatctgatgcgcgggttgaccgagtacggacgggtagatatggcctataagatcctgacgaacgagacttatccgagttggggatatatgattaagaacggtgcgacaaccatctgggaactttggaacggcgatacggctgatccggccatgaactccgccaaccatgtgatgttgcttggtgacctgctgatctggtactacgaagacctggccggcatcaaatgcgctcccgatgctgtcggtttcaagaaattggtgatggaacctgttttccctgatggccttgacgaagtttctgcctcgtacggttcggtctatggagagatcaagagcgcatggactaagaagggaggcgactttagctgggatatcactttgccgggcaatacgtcggcgatcgtccggattccgaagaaatacaatgtgacggtcggtaacttgccgggtgtgcgcagagtttcggcaacggaaggatatatggaagtcgagatcggttcgggaagctatcattttggaaaatagtttcgaaaagatttggatgatatatcaagaaaccgtaattttgcactctgaattctgcaggaggtaaacaagtgatgcttagaagtgtatccacctccgggacataacctgtttaaatataaaaaagacagatgtacgtaatcgtagaaattaacggacagcagttcaaggctgaagaaggaaagaagttgttcgttcatcacattcagaacgctgaaagcggtgctgttgtggaatttgaaaaagtgttgttagttgacaacaatggtgaagttaaaataggtgttcctaccgtagaaggcgcaaaggtagtatgtgaagtgctgtctccgctggtgaaaggtgataaagtgctgatcttccacaaaaagagaagaaaaggttatcgtaagttgaacggtcaccgtcagcagttcactgaagtgagtgtaaaagaaattgttgcttaacgtttaaaggagaaaagaagaaatggcacataagaaaggtgtgggtagttctaagaacggccgtgaatcacaaagtaagagattaggtgttaagcttttcggtggtgaagttgctaaagctggtaacatcatcgttcgtcagagaggaacagttcatcatccgggtgagaacgtaggtatcggtaaagatcatacgttgtatgcattggttgatggcgtggtaacttttcgtagaggcaaggaaaaccgttctttcgtttctgtaaaaaaagtggtagcagaagcataagtattggttttatatagaaaataagaaaaaggatattcgcttggcggatatcctttttttatatctttgtcaacatcatgactcgtaggaattttatcatactttatatcggaatactgttgttttttctggctctaacatcgtgtggcagtaaaaaacaatgtgtagttttaccttctgatttcaagggaccgaaggagctttcccgtctctatggtgtccgcctgactccgaacgataatatatttttatacaatgaaggagccagatggcttggcgtccctcatcggatgggtggattgacaaagaaaggagtggattgctccggttttgtggcgattgtgtttcgtgaagtctatggaaagcagttggcacgttcttcggctgatatgctgaagcataattgcaagaaagtcagccgtgccaacctgaaggaaggtgatctggtctttttccggacgggcaaaggaaggaagaaagtgcctaaccatgtcgggatctatctgaaaaatggtaagtttatccataccagtacatcgaacggtgtgatcgtcagtagcctgagtgaaccttactatgtccggacatggcttaccggtggccaggtgaagaatttgtgatttcctgtgaatcactcgattattttatgtaaagacgactataaaatagatgaaaccgggtgtttttattgtccggcaaggcactttagttgccggacatccccttgttgcccccttttacacccggatgtaccggctccctacacccggatgtaaagaatggcaacatgggggtgtttacggaattatgtgcttgtttctgccgaaaaaagagagggcttttgtggaacgaagaaccgtatttcgccgatttaatatctattgtacctgtttttacatttgtttgttcaattgttctatatgctttttgaaaggaagaagatatcaatgggttgattttcagttatatgataaaaatgccatgttttaggagtgatagaagagtgatagaggaaaacgtcctgtatcattacctgtaacgattgaatatcaacagatacaacctctgtagtgatagagtgatagatgatttgcagaaaactttgcatgttaatcactatcttggaaaattttgatgcggttgccctgtttatgcgtcgatgataaatcataaatcataaatcttgattatctttgcaactcaaataaaaaaacatcattaaagtatgttgacgcttaaagtaattacggaagaaacagatcgggtgattcgcggtctggaaaagaaacactttaaaggtgcacaggaaagcattgcaaaagtgatcgaattgaacgataaaagacgtggtgcgcaaaatcaattagataaaaatctggcagaggtgaaccagacttcgaaaaccatcggcatgctgatgaaagaaggtaaaaaagaggaagccgaaattgctaagcaacgtgttgctgagatcaaggaagtcaacaaggctatccaggccgaaatggatcaggcggccgaagatatgcagaacttgctctatacaatcccgaatgttccttacgacgaagtgcccgaaggtgtgggagctgacgataataaggttgaaaagatgggcggtatggaaacggaactgccgaaagacgcactgccccattgggaattggcaaagaaatatgacctgatcgattttgacttgggagtgaagatcacaggtgccggtttcccggtttacaagggacaaggtgcgcagttgcagcgtgcgctgattaacttcttcctggatgaagcccgtaaatccggttatacggaaatcatgccgccgacagttgtgaatgctgcttccggttatggtacgggccagttgcctgacaaggaagggcagatgtatcattgcgaagtggatgatctttatctgatcccgacagccgaagtcccggttactaatatctaccgtgatgttatcctcgatgaaaagcagttgccgatcaagaactgcgcctatacgcaatgtttccgtcgtgaagccggctcttatggaaaagatgtgcgtggactgaaccgtttgcatgagttctctaaagtggaattggttcgcattgacaaaccggaacactccaaacagtctcatcaagaaatgttggatcacgtagaaggcctgctccagaaattggaacttccgtatcgtatcttgcgtctttgtggtggcgatatgagtttcacggctgccctttgttttgattttgaagtttattcagaagcccaaaagcgctggttggaagtaagttcggtttctaacttcgataattaccaggcaaaccgtctgaaatgccgttatcgtgacgagaataaaaagacacagctctgccatacgttgaatggcagcgcattggctttgccgcgtatcgtcgcagccttgctcgaaaacaaccagactcccgaaggcatccgcattccgaaggcgttggttccgtatacgggatttgatatgattaagtaaataagtatagaaaaaactatagggtggtaaaaacggtcggtatctgtttgacaatggatgtcgaccgtttttggtagcgacaagcatctattttcaaaacaccggtgattcgattttaaaacatatatgctttgcaatcaaaacatcggtgttttgatagataaggaattgtaccaaatcagatgaacagatttacattcgcctcttctgcccgttcgagataagaagccacgccgcccagtgtaacattgtccatcagttcttctttttgcacgcccatgacatccatgctcatggtgcaggcaatcatttccacgccattgtctatggcttgttggatcaggctttccaggctgtcgattcgctttcgcttcatgatgaggcgcatcatccagctaccggcgcctcccatgttcattttagacagtttgagtttgccactgtgtgtcggaagcatccagccgaacatcttgccgaaaatatctttggtgactgttggtttatgctgtttcttgatcacattcagtccccaaaaagtaaaaaacatggttactttcttgccggtcgaagccgctccattggcaatgacaaaggaagctaacgccttgtccaggtcgtcgctgaagacgatcagtgtcttgttgtcggcattgtttcgagaaatctcgcaggaagctgttttctcctgtttgcggatggtggcggcgaccaccccgtttttgttttccaacgcaaccagctctgcacctgtcatcttgcaccaggaagtgacatccttgccgaaagcctggtcggtggcagttatctgaagttgttcgccgatcttcaacgcctcgtagttctttttcaattgcatcacaggtccgggacacatcagtccgcaagcatctactttcaacagattgatctgggaatcggagtttccatagcttgtgctttccggtatttccggcttgtgggaaacgatctcttttatcggtgcggtcgctacgctccatgttttgtatcctccggataggttgcgcacatgcttgaagccattttgtaccaagatgcgataggccaggtaaccacgcagtccgactgcacaggttacgacgatcggtttctcctttggcagctcgtctaaatgttctcgcaattcatctaccggtatgtttataaatccgggaatcgtgcctaatttatattcgtcgtgtgtacgaacatcgattcgaatcgtatcggccggaagttctgcgagctcgcgccattggatgatccgggactttttgttcaaaatattttctgcaacgaatccggccatattcacgggatctttagctgacgaatagggaggtgcataggcatgttccaattccgccaggtcgtggactgtaccgcctcgctgtatcacttgtgccagcatctcgatacgtttgtctacaccgttgaagccgacaatctgggcgcctaacaatttcccgttttccggagcgaacaatattttgatggacaggggaacggctcccggataatatccggcatgagaggccccatgtgtgtaggaagagatatagggtatattgttccgttgtaataactttgcattcgctccggctgcggcaaccgtcaggtcgaatactttcgcaatggaagttccgattgatcccggatatttctctttgttgccgaatacgatattgtccgccacgatgcgtccctgcttgtttgccggccctgccagcggaataagggccggctgtccggttacgagatggcgtacttcgactgcgtcgccgagggcatatatatcggcatcggaagtttgcatataatcgtttacggcgatgccgccccgttctccgatggcgagtcccgcatcttttgccagtttggtttccgggcgtaccccgatgctcagcaaaaccatgtcggtagcgatctgtttgccgctgcggaggtgtacggtcacaccaccgtctttttcttcaaagcggctgacaccatcttctaagtgcagtccgactcccttatcggtcagttgccggtgcacgattgctgccatcgagaagtccaaaggagccatcacttggttggccatttccaccacgtcgacctggatacctaagtcgtacagattttccgccatttccagtccgataaagcctccacccacaacaatagcacgtttcggattttcagtattgacataattcttgatcgtatcggtgtccggcacattacggagcgtgaatattttcttgcttccgatcccttcgataccaggccggagcggttcggctcccggtgaaagtaccagtttgtcgtatgtttcggtgtatgtctcgcctgtggataggttcttgatttccacttcttttttatccggacggatagcggttacctcctgttccgtgcgaatgtcaatccggaaacggtctgtgaaaccttttgctgtctgtacgaacagcttttctcggttgttgatcgtgtcaccgatataataaggtaggccacagtttgcatacgatacatattttcctcgttcgaacaagatgatattggctttttcatccattctgcgcagacgtgctgcaacggtagctcctccggctactcctcctataatcaggtagttcatgttgtaaaaatattatttgtattatacatatttgttaatggacaatattgggataaaaaaaggttcaacctttttccatacaagttttcagtttctcaaacaatccgtcgaaacacagttctgcattcatcatctgctgtattttttcttttccgccaggagtgagggagaagcacatctgccgtttgtcgtttttgttgatgttgcggcggatataacctttattctctacggctgtgatcacttttgaaacgcgtgagttggacagacctatatattcgcagatcatacctgcggatttcgtttctccgtctttcaggcagcagagtaacatggcctcattgatcgtaatatcgtgtacctccgcaaaggttttctcgaactggtataaagctttgtatatatcttttattgcacaaattgattccatattcttatatgttgttgatgggtacaaagatatataatattttcaatataaataatatttagtggaaaatattttgtctggtgataaaaagagagtgtgttttgtggaataaaaggatgcatgctattatctgaaagcatgcatccttttgaaataatttttgccggatgagacagagtcttgtttgtttaatctctgttggagaaatatttcatgaactgcgagcgttcatacatcgcaggattggagatgttggcatagtttagtttgcctttgaactggtcaagcgactgataatgcgcttggtgcatccattcttcaatacaggtaagcacctgtgagataatttctgccccatgtgtatagacggcgctacacatctgtatggcgtcggctcctgcaagcaagcatttgatgacatcttcccaatcgtgcactccagtagaggaagcgatgctgattccgggtatcttacctgaaacgattgctgtccagcgaagcgtgtcactcaggtcggaatggttactgaaaacgttacctgagacaatttgcatattgttgatgtcgatatccggttggtaaaaacggttgaagaggacgattccgtccgccccgttaactgtcagcgtatgggctacagctggaatattaccgaccattttgctcatcttgatcatgacagggatcgaaacagtttctttcactttacggataatgctgacatacaagtcacgcatgttttcactgttgtatgtgaggtttgtttccaagaagaacacgtttagttccaaggcatcggcacctgctaattctatctggcgggcaaattcgatccatgcatccgatttatagcagttgatacttgcgataaccggaatggtgcataattctttcgtcttctggatcagttccagataatcgtttatctgattcgcctttacataaccgcgtatgtaatcggctgcttcgggatagtccgaatcctgcatcagtatatcgctttgcatttcaatctgctcttcgaagagtgatttcagtacgatcgcacctgcaccggctttttcaaattccttgtttcgttccgcgttgtttgtcaaaccggaacttccgacgataagcgggttacggagtgtcagtcccgcatattgtgttttaatgtcaatcatgtcagattcaattatgttcaacgattacaaaaatagagaattattttctaccttatctgttcttgctctttaaaatggttaaaactcaatattcccgttctccgaaaatgctggttcctatgcgtatcatcgtactaccttcgcggatggcgatcggatagtcgtggctcattcccattgataattcgcaaaaatattcgtcacccttgaataccgagtttttcagttcagtgaaaagttcatggatattatgaaactcatttttgatcagagatgtgtcgtcggtgttggtcgccatccccatcagtccgcatatccggatgtagggaagggcttcgggcaacagattgtatagcagttcacggcattcgtcaggactgaagccgtgcttggcttcttcttgcgcgatatgtatctccaacaggacacggatgatacgatcatgtttagccgcttgcttgttgacttcctgcaaaagttttaacgagtcgatactgtgtatcgtgtggatgaacggggcaatgtcttttaccttgttgctttgcaatgggccgataaaatgccattcgatgtcactgggcaatactttttgtttagctgtcaattcttgggccctgctttcaccaaatacacgttgtcccgcattgtaggcttcctgcaatgcctcgacgggatggaacttggagaccgctaccaacgtgacacctgccggcagcgatgctttcagtcttgttatattttcagtgatgttcatgcttctcttgtttccgcctgttttttctgttcggcaatcagttcttcctctgatttcttttccgcagggacactgttggcgtcaaaaggaaagacatccatcagttgggtttctgtaacggaggcgatggtatagtcggcaagcgttcccttcattccgtcttccaatacggcgatggcatctttcaggttagacgcctgtgccagcatctgtgcagctgttttcttttcggctccgcttttttcatcgagggtgatgaagtaaaccttgatcttatagaaacggtcgccattttcgttgaagaacaattctgacaaacgggcgcgtttgatgtctgttacagtaaattccccggatacgaaggggcggatttcttcgatgatgcgggcttccgcttccgtgaacgacagggcgtcgaccaaatagggttccgtcactttcttttgtgctccattctccatgatcttctcgaaggagactttgcattcaaaccagttatgcatatatttatatgttttataatgtctgtatttttatttcaaaccaaggtacaaatataacggctattcgggaattaaacaaccggaacggatttctttgtcaattattggatcgtagtgaactttttgccacatgctccggttatataaacgtagtgtgttttttcatggtattagatttttagattagtaataggttgttttgtctggttcgagaggaataggacaaaagttctaaaatatcagagccggaagtgtaggaattccccatacattccggctcttttacgtttcaaaacccatcgtttcttcaatttcaaggcaacatgtgtcttccccctactgcttgtttataagattcgacgtatctgtcaaaggtaaaacaattattttttattctctaatttgtagtataatattcaataaagattttgaaataaagggagctagaaaggaaatgtgcaactcgtgattgggtgaaaagggaaatattcactttatcggaggaaagaataaagcatacaaaacctgctgcacgctggtggtacagcgtgcagaggtattggattatttagtatgcagatcatcttgccccgtcgggcatgccgtattgactgataataaattacctcaaaaacaatttattaaggttacatagattaacattcagacaattaaggccatgaaggtccgattacttaatatatctatatttcctccagtccgggaatgtgttccgcaggaaatcacgcagagtctggcggtttactccgaatttttcggcgatttcgttcatcgagcatttctcattgatcattttcttgatgacattttcttttccggacaacctgacctgcatggtctttttgcctttcggacgaccgagtttcgtgccttccgcttttttacgtgcaagtgcttcacgggtacgttgtgaaatcagattgcgttcgatttctgcacttaggctaaaggcgaaggccagaattttactattgatattattccctaattcatagcgttctttgactgtaaggacgataatatcccgttccatacattggtgaaggaagctcatgacttgcatcaaattacgtccaagccttgatagttctgttgttacaagcgtgtctcctttacgaatttgttttaataatctgccaagttggcgatccgatacacttgttgttccgctgattgtttcgtctacccaacgttcgatacggaaacctttcgcttttgaatagttttcaatctcgaagcgttgattttcagtactttgtttatccgtactgactcttacataaccgtatatcatactatctgaatattaaatgaataactaaagatacttcagaaatagaaatgaaggaggggattagtatttaccaactttttttattgtcgtgtgattataagagtgcattccctctacaaaggtggatataataatttaaacgaaacagcctctgaaagtaaaaattaaattaaattttacgcagtgaaaggggaaaggagtacatttgccggaaagaatagtaggatatgaagaaattattgtcgctgccgcctaacttggttggcagttttcacgagatagctaatgccgatccggcagactggttttgtacgtccgatcctataggtgcccgtctgggatcgggtggaggaacaacttggttacttgaggcttgccgccgggatgacgatactgctggaacgttgtcgacaggagaatggctggcgcgtgaaaagcggattttattgcatgccggagggcagagccggcgtttaccgggatatgcaccttcgggcaagatattgacaccgattccggtgttccggtgggcgaggggacagaaattatctcagaacctcctttcgcttcaacttccgttgtatgaggagatcatgcgcaaggcgccggattcgctgcatacgctgattgccagtggcgatgtttatctgcgtaacagcgagccgttgcaagagattcctgaggctgatgttgtctgttatggtttgtgggtggatcctgcactcgccactcgccacggggtcttcgtgtcggaccgcaaatctcctgaccagctcgatttcatgcttcaaaagcccactctcgatgagttgggacggctggcggggacgcatctcttcctgatggatataggtgtctggctgctcagtgaccgggcggtggaactcctgatgaagcattcctacgaatcggatgggaaacagatgaaggaatatgacctgtattctgagtttggtcttgctcttggggggcatccacgtataactgacgaagaactgaatgcgttgactgtcgctatcttgcctttgccgggtggtgagttctatcattatggtacaagccgggagctgatttcttcgacgttgtcggtgcagaatcttgtgcgtgaccagcgggcgatcatgcagcgtaaggtgaaaccacatcctgccatgtttgttcagaatgccgaagttttttgttcgctgacctctgataattcagaactgtgggtcgaaaacagttttgtcgggaaacgatggacgcttgccgatcggcatgtgattacgggtgttccggtgaacgattgggagttacacgttccttccggtgtgtgcattgatgtcgtgcctgtcggtgatgaaggatgggtggcacgcccgtatggtttcaatgatactttcaaaggaaatacggcgaatgaatctactctttttatggggcgtcccatagtggaatggtctgcggagcggggtatcaatttgccggcctgtgccgacatacagaatgcggccttattccctgtctgccggagtatggacgagttgggggctgtgttacgttggatggtatctgaaccttatctggatgaaggacgcaaggtgtggaaagtagctgaaaagatgtctgcaaacaggctttctgattgtgcaaatctccgccgcctgtttgcccagcgcgaagcgttcaggaagaaaaactggtcgatgcttgctgccaatcatgacaaaagtattttctatcagttggatctggcggatgccgcctccgaatttgttgccggaggaattatgttgcctaagggtttaccggcggatactccgctgatgaaacgtgtgcatgaccatatgtttcgtgctcgtgtgctgcaactttcaggagatgaacagggcatggtggaacagcagcaggcattctcgctgttgcgtgaaggttggatcagtacgattgctgatgagaaacagatgcctcgtcttaatgtctatcgcgatcagattgtttgggggcgcagtcccgtgcgtatcgacttggctggaggatggacggataccccccccttactgcatgtatgccggtggtaatgtcgtgaacgtggcgatcgagttgaacggtcaacctcctttgcaggtttatgtgaaaccgactcgtgagtttcgtatcattcttcgttccatcgatatcggggcgatggagtgcatttcgacttgggatgaactgcgtgattttaacaaggtcggatctcctttctctattccgaaagcggcgttggctttggccgggtttatacccgaattctcagcaggctgctatgtttcgttggaagagcaactgaaagcattcggatgcgggttggaagtgacgttgttggctgcgattcctgccggttctggcctgggaaccagttcgattcttgcggctacggtattgggtgcattgtcggatttttgtggcttggcgtgggataagaacgagattggtaaccggacgctgatccttgagcagttgctcacgaccggaggaggctggcaagatcagtatggaggggtgttacatggattgaaactgttgcagacgggtgagggtttccaccagaatccgtcggtgcgctggcttccggaatatctttttaccgaaccggagtatcgtgtctgccacttgctttactacacgggaattacccgtacggcgaaggatatccttgctgaaatcgtacgtggaatgttcttgaacagtggttcccatcttcgtctgctttctgaaatgaaagtgcatgcattggatatgtacgaggcaatccttaggggtgatttcgcttcatacgggcgattggtcggtaagagttgggaacaaaataaggcacttgatgccgggacaaatccgcctgctgtggaacggctcatttctcgcatcaaggattatgcattaggctataaacttcctggtgctggcggaggtggctatctttatatcgtagccaaagacccggaagcctctttgcagatccgccgtcttctcacggcagatccgcagaatgacaatgcccgttttgtcgaaatgagtttgtcggataagggattgcaggtgagtagatcgtaatccgaaaatcgcaatccagaatccggattgcgattttcggattacgtttcagatctcggcgacggggggcttgcatattccttgatgatcagatatccgcatcccccgatgaaagcgaggaagatgaatgctaccaaaatcagcaatttcttgggagaggaagctttgagaggaacagttgccggttcgataatggtgtagaccggtgtctgttcctgtactcggagtttatcctgttcgagcttttgcgctaacgtgttatatacattgaacgtaagagtcatttcgttgcgtaaacgctcttgctcggtgcggtaactggcggagataatgttcttgttaccgtcttcaaaagctgcataagcctgctgtgctttgtaataggcactgcgggattcttttagcactttttctgtaaattccagatctttctttgctttctgcgtccggtaatgtgtgatataggtctgtaactttatcacgatactgtgcgccacgtctgctgagatcagcgggtcttgcatgctgacaccgagagtaacgacttgtgtttttttatcgacatagacggtgatgcgctggcgtaggtttttcagtacatcctcttgcttgtgggtgagttggaagggattgagatctccatcgttctcttcgttaccggagaagaacgaacggagggctgctattccttttaggggcgctttcataaggatgctccaccaagcgaagcgctgatggccggctatgtaatcatatagagtagtcgtgtactttttctccttgtcggttaccttttcgggaaagagctccaacagaaaaggtgtactgtgcacaatatcaggatagaggttgggtgacaaagcatcctggccggaggctgaaccgaggtctattcctgccatggctgccagtccgccgaggttgctcatcttgcttgtggcatcggtggtttcgggagccagtttcaccgttgtggtgaattctttgggtatgctgaaagcaatgatgagtcccgccactgttgcaattccgcagcattttatgaagaaacgtcgttttttccacaggtagccggagagggcgattaagtcgatctccggctgtggagacgatggggtatgattgttcttgtccatttgtttactttaaaagattgatcattgatgttatcattgctgccattgaggtgacggaactgccgacactcatgatttctgccaggcttgctcggcggtcgcgttgtgtcttggcggggactatgatttcgcagccaggctcgactttggggtaacgtttgaagaaaatcattttacgttgtgtggtcgccacttttccgttcatgtagataacgatgggatatttgcgggcaatgtcgttgtagccgccagcctgtgagagacagtcacggacgtccattccttttgtataggtcacactgttaggataggtaacggaaccgctcaccttcaccgtactttgctgttgggggatgtaaagcacatctccgtcgcgtaacactaggtcgtcggcacttcccggatgggcgagcgctttttgtaggtcgatgcctacgggatactccttcaggttggcaagcgaaacggagatcgagtcacggctttgcttgctattgttactcaattgtaagagagtttcgatttggcgcaactcatctgtcgtcagtttacgttttagactggctccccgcacataggcgtctggagtgatgccgcccgattgtgcaatcagttcgcttaaacgcgtattctttttctttaaagtatagttgccggcaaaagtaatctcgcctccgactttcactacttgttgcttttggtaaccaggtgagaaacggacgaatacttcgtcgaatggttcgagggtgaaaagcgtatcgccggaggttactgccagtccttcgtcgagggtgaagttaaatgtctcggctgtctggttactgctccgggtggcggacggatctttgagccgtcgtgccacttctacgttgatgattgaggctgcttcgcgcaggccgccggcgaggacgataacatcctctactgtcagattcttgcggaagggcaatacggtatcgggagcgttgactgctccgctcactttgacggtataaggttcatggaggtcaaacagggaagggatatatagttggtcctccttctgtagttcgatgtcaggaaccttcccgttcaaaatgtctacaatattgatggcgataaccgaactggtgaagtctgggttgagccttgtgatctgtgcgcgtcctacaaattcgtctcctttaagtcccgaagcctgttctatcaattgtttgacagtatgtacgtccggactcaactcatattcgccaggacgccagactgcaccggaaatgatgattcggttatcgtagtaggggatgactgaatccaccatcagcgaatcgccgtcttgcagcacaaatgtttggaattgttcttcgttaactgtggcaatcttgtagcggtcgccggctttgcgtttcactcgtatactgccagtgtaggcatcccctgtaaaaccacctgccatgtcgagcaggtcgtcaagtgtctctcctcgtcgaagttcgtatgtacggtctcttttcactttaccaccggcggtgacaagctgttcgtagggaccgataatgatcatgtcgttgtcttccagacgtatattcgtttcatatttaccattcagcagatagtcgtatacatcgaggctggcgatctctttgctgttccggtatacttttatgtttctcagtgatccgatatcgtttactcctcctgctgcataaagggcgttgaaaagcgtggcgagagatgagagtgtataggtcccgggtgcgacggcttcgccgacaatattgactttaatgctgcgaatttgccccagtccgacagaaacgaatgtgttaggttgactgccgtcaagcgttgccatgattttacccaattcctgccggatgcgattctctgccgcctcgatagtcagtccgcttagggatacgggaccgacattggggatcaagatcgttccgtcgggagaaatactgagtttcaagttcagctccgaatctccccatacattgatcagcaactcgtctcctgctgatagaacataatttttaggcgtcggcatattcagatccggttcgaatgtcaaattcttatcggaaaagatctcacgcccaaaaacaatattttccaaaggctgcttcggtttatgttcgtcgcgttgctctgtcagtgggagaagtgcttgctgagtaggatgggaacggtcggatacggtattttctgtagcaggcttaatgatttggttgataccggtttgttctgtcctgtgtttggctatttctctttgtatttgttcctctgtcatcccggcagcacgggctttatcaattaattcctgtgggatttgtgcctgtatggcaattgatattagcaggagcaggaatccaatgatacattgtggcagataccgttgtcttgtcctttgacgacctaacggctttcgatggcataatacagcttgttttttgtcaagatttttcatattactttttctattgtttgaacgattcgttggcttgcagttccgtctccataggggtttactgcttggctcatacggttataataggtattgtcatctagtaagtgggacacttcagttacaatccgggcgtaatatgttcctactaacttcactgtccctgcgtcaagtgctcccggccgttctgttgtgtcacgcatgacaagcaccggctttcctaaacccggagcctcttcttgtatgcctccgctatcggttaggacaagtgtcgacttctccattagatagacgaaaggaagatactccaaaggctctataaagaacaggttagggagataagcatttccgaatatttcgtgaatgggcttccttacatttgggttcaagtgcatagggtagacaaagtctacctccgcatactgctctgccagagtctttttgcccggcatatttggataaatccatcgccgaagttttcccggcgatgacctgttattaaaaccagtttgcggctgttttgttcggcaagtggagttgttttataacctgcagacatcagttcggtgtcaagttgcttaagtagggtattcatttcttccggccaaggactgtagatgttgtgcgtgcgtaaccctgcttctacatgaccgaccggtatttgttggtagaaggccgcgagtgctgaagctgtcgaagttgtggtatctccatggaccagaacgatatctggcttcgcttcctgcagaactcctctcattcctgtcagtacccgggctgttatatcgtataggtcctgtccttgcctcattatgttgagatcgtaatcgggccggatattgaaaagctttaggacttggtccagcattttcctgtgttgtccggtaacacagacgatggttttaaatttatttttttctgttggaaagcttttactaatggtgccattttaattgcttcaggacgggtaccgaagacgagcattattttcttcatgttgtttctgtttagatttttccagtcttgaccagtatcaagaatttgattaaatgtatttgtcgtttgatgcgcgaaggttgtttcaataggcggtatgcaaattcgagattgtgctttatccaccattcgggtgctcgtttcacgttccctgtatagacgtcgaaacttcctcctaacccttggtaaattgcgggatgtgcctgatacattttttccatcaataactcttgtttgggtgatcccattgcaacgaatatgacatccggctgttttgtcttgatgtcttcgatcagttcttcctgttctgtctctgtttgtatgtatccgttacggtaccccgttatctgtattccgggaaagtcttctttcaatcgggagatggtcttctctattacgggctgtttactcccgaccaagtagaaggttttttctttttgatacagagctgctataatcttcaaccacagttcgcatcccgcgatcttgacggcatccacggctccgtgctgccgcactgccataactgctcctatgccatcgcaatatccaatattcctgttcacaatatcttgtatttgctcgttcgcatgcagtatcttctccgcatttatcgctactaatatccctttatgttcctccacatattccagcaaactggaatctgagggaaaggggtggacttttattccgtttagttgtattctgttgtcgttcatgattgttgcattaattgtccgaattttttggtctgaataccttctttgattattctggcaggattaccggctacgatgcagttggcaggtatatcttttgtaacgacagatccgcttccgacaattacgttatcgttaacttttactccacacatgatgatcgcatttacgccaataaagcaacgtttaccaatgtaggtgtcggctttagcaggtttggaaaagtcatgagctaaaataacagctccagatgcaatgaagctttcttctccaatgtgtactcctttgggattacttttatcgagtttggcaccaaatgagagttttgcgcttttatcaatattcatttgatagattcgtgtataaataaaatgcatcccgaagatgatacagtctctgattatttctctgatttttactatcatagttattgttttaagctggagatgtcaatccatttactcatttgatctgtcagttctggggtaatattactgatgacgtctggagtaaaagtcatttctccaaagataggggatccgttgataagatataaatctactctaacgaaaggaaagggttcagataaacgtgaagcaattgatatcatttcttctaatgcgcctggacgaggaattatatctgatatcggacagcgagaatttacaaattcaggataggcattccaatccatgtcataaaccataaccgaataattatgtgtgttttcttccctgtctgaataaataacgacatatttaggaactccattaaagcaaaaaaatttgtaatcgatgagtgattgttcgcttttttttgtctgctccataaatttttctgcaataataagaggttctatctgtgtataatgcaattgtccggttaattctccatatggaaattttaaccatttatttaatttatgatttgtctcttttatatttaggatatttttatcctttactataatatttgttgcacagctatttgtcgtttttaatacaaaggatttaggcaataggctatagtcgatttctatagctgaattgtatataccataaattttgtttacatattgttctccgcatctatcaatcacatattctcttactctgtatttgtcggctaatttactccacatagaagtgtcagaataaagtgatagccatagaattttttccataaatgactgtggcttctttagattggggaactttttataatctttacaatatctgatcttccaaattatattgggaaatttctttaataaaggggagaatggagttgcaatttttataagaactgacttgataaaaatattcatatgaatttttattgattaatatatgttgaattatagattgaatttagaaaaatgtagttctatttttctaatgattgatatagatgatccaattgtttttctattgctggaggatagaatttttctgctttctttccagattgatgtcccatttctgaaagatattctggatgatcgattaaaaataggattgcttcgtaaagttgtttcttatttccaggttcaataagaataccgttaacattgttttcaacaagatctgtaatacctccaactggtgttgcaattatgggcagttggtaggacatggcttcaagaatggatataccaaatgattcaaaaatagaaggatggacaaatatgtcagcagttcggaataatttttcttttctttcattgtctacccatccatggtatttgataaaagaagaaagttgatgttgctgtatgaattcattcatagtttttgtatctcctgtacctccaatatggtagataattttgttttgcaacatttctttgtttttcgcaaaacattctaatacatcaaatattccttttctactatctatagctccaatgaaaagaagatggagcttttggtcgttctttttaatgggaccaacactgggcttataggtgacattgggaaggagaaaaatattattattgagtttttgttcttttaaataattgataaaataattagaaacagtcaccaatacatctgctttatggcagacaaatcgaacaaaagattggtgattctcgtagaattgttcaaattttgctccatgtatatgtaaaatgactttttttctgaaaactttagcacaaaatacataaatcgattgacgataaaaatcagtaaatgatgctgtatgtatatgcacaattcggattggtttgaatatacaataatagcaacatcgtaataaggcagatatgcttaatgctgttttcttaaacagatttccttcttgatgtgaagcaatgaaattaaatttcttgaacatctttgaataagattgtatgaggattgcaatccctcctttgccgtttgtgtcagttcctatagttaggatatttttacttttattggatatcatgattaaaataaagatgattactaattacccagtaaactcctaacagtggagctaattgagttgaaaaaaaagcatgtcctgctgtataggcgattcctaaccatagtatacttcctatacttgttataaatgataaagaattccgacttctttttataaaaaaaggtcggatgaactggaatactaaaaaaagttgtgcaaggatgataagtcctcccagaacaaatccgaaggataatatgatatcgtaaaaatcagattctatattttttactttttcttctgggtcgtatatgcttgctacggcaaatcgtcctcctgaaatacccttacccaaaagaacctctgttaagttgaattcagaaataacttgtttaccggtattgatcaattgctctcttgatgatactaacgaattagctgaaaagcgttcaagtgtaaaattatcatattgaataatagtttcatatgttatgatagcagaatatacgatagcgattgacatacaaaatattataagtatccgggtttgccatcggagctgaataaggctgtctttgaaaaaaaagaaatagcctaagaaaagtccccaatctgccagaattccaataataccgacacgagaaccgataagaattgttccgactgatgcaataaatgtcagtaaaaaataaaatacattccgtttgtaaaaggaataccaaatacaaagtaatacagctagaaccatatatactcccaatgcattgccgtctgcgtaatatccagagtatccgaatccaaatttatcactgtatgaaagaatcccggtttgtgtaatcatagagaatatattaattgcacctataagtgaagttgtataaacaacaagtctgattaatttctcaaggctgaatattttacggtaataataaaaataaaaaaggatgcagaaggtgtagataaacttgaatagatagtctatgtccattgctgcatctatatattttcctgtaaaagaccagatagcaaatgccattgaaattaggattgtaataatccaaaataagagagttaataatgtgcttaaattttttagtaaaaacttcatagttaggcataatatgaatcctctaaaagctattccgattggtaaatgcactcctttaaattcctggatgtatccatttgctgagtcaaaaaaaatagaaatgaaaaataatataaaaggaagtacttgtatatagaagttgtctatgcttatggagataggcttagctattgtaaatgttttcatattcttccgttatgtgtttaattgtaaacctcttggcatttgcaatgcctcgtaaaattaatttttccctatatttatcatctgagataagtttttgaaatccttttctaatggagcttacatcataaggattgatatagtgggctgtatttgctgctatttctgggatagaagttattttgctggttagtaaaactcttccagtagcattggcctctattataggcattccaaaaccttcatataaagaaggaaaactgacgatgtcacattcttggtataatctaatgatattttgaaagggaatatccaaataatttttatattggatatgattcttttttaattgctctatatgttcttgttttaaaatccctacaatgattagtgtacagggtatattgcgtaatgcttttattgtgcgtagcagatttttgcgcatgcctgttccaatatggaggatatgaggattttcttttcggaattcttttgggtgaaaatgaataacttcattatagggattatagacaatgctgattttattttttactcttggagttatctgtttgatttcattcgctgtatattgggaaatacaggtgatatgtttggcaaaatgattaggcagaatgagccagaaccattttctaataaatcgctttaggaaagatgatgattgtaatagagttcctgtatcatgccaagtgagaattacattaccttttaaaaatagagagatataagctatctcaggtgaaaaaatgtgattgatatctccttggtgtttttgagcgaacctaatatttcgaatgattcctttccaggtatttccgtgttcaggcaaagtaataacttttaatcctgatattcgggatgcaagcgaatatgccagttcttctatactgttaagtcctgtcgactttttacgtaaaaataaggcctttgaacacattgttatgattttgtagtttgaatggtacgaattgcttttttgtaaataagagaacgctcagccgtctttagtccgactgtcaatagtacgatggtggttgaacttacagtaataatacatataagtataaatccggtgaatgtgtcaggaatatattgggacagccctgtcggaataatagctgcaagtatgaagactaagagacttcgaccaatcacttctatgatgaagttggaaatatgcataggtattaatgcattaagtatccatattcgtgctattaaagcaatgagttctgtcaggatagatatatacatgactgtataaggtggatatccggattttaatacaatataggatattggtatatccagcaatgtaatcactaaaattatggtttgaaatagttttatttttccttttgcttgtatagcagtggctacaggtccagttatactgtttattaaagttacaatcaataccaatcgtaaaaacatgacagtatattctggtacaatacctagccaaagatttaatatataaggagttttgataagtacaggtaatgttaaatacagtaagaggaaaaatgaataacgggaactattatgtactaataccatcattgaatttgtatctcccattgcatatcgtttagttatttgcggtttcattgcaatttggaagtttgatacaaaattataaattccggcatttacttgataggctacaccacgtgcagcgtttactgcaggtccgaaaaatagattgattagtatatttattccttgcattttgagtgaatatccgatgttacctaaaaagctccatccggcaaagcttaacattttatgtagtaattgtttatctatgtcatttcgaaacttacattctttaaaatactttttgcaatataaagtatacgtgatgcttaccaataaagtgacgaaagacattaagattgcatataaaattagtttatctgacgctgagcccttcaacaaaaaaacaatcgctaattgtaatataacttcaagtatacttacataggcatatactttcatatgttcatgggctactatactggcattatagggaacgctgaatattttaataatgaatgtcaggattgagaattggaacacccaatttgcagcaattattcttgaagttggtatattcattttatgattaagaaaccatagacctactgtttctgctaatataagtaggaaaaaaataataatcaggtgaatgataagagatgtggaaaaaactttttgcagttgttgtccatcatttttccctaattcgtaggtgagaaaccgttgagaaacatcaatcattcccacatttagaaactggaacattaatacaatgtcacctactacgttgtatatgccataatcatcaattcccaagacatttaaaacgactctggatgtgtaaagtgatactaataggatgactagtgtcctgaaatataagaataatgtattttgagctatccgtttgttcgtattgtgagacatactttttattctataatttcttaaacaccccgcaaaaatccaatatcactttttcttcgttgtgaggtaatgttttgaattctttgtgggagacgaggaaggcgacgatgtcggcgcgggtgtaggcggatttgtagtcggtcagtttgaagactgcatgttcgtgaacgttgggttcgacgattaggatgtcggtatcggctgaacgttggagaactttcgaggtgatgtatttggctggtgattcgcgcaagtcgtcgatatcaggcttaaaagaaaggcccatcagagctactactggtttacgatgatgctcaaggaagaagcggaggatggcgttttcgattttttcggcgcaccagaatgctttgtaattattgatttcgcgtgctttcgagataagttgcgactcgtagggaaattcggatgtcaggaaataaggatctacggcgatgcaatgtcctcccacgcccgaacctggttgcagaatgttgacacgcggatgtttgttggcgagttcgatcagttcccaaacgttgatacctgccttgtcgcagatcagcgacagttcgttggcaaaagctatttggacgtcacgtgacgaattttccgtcagtttgcacatctccgctgtccgagcgtttgtccggtggagtgtccctctgacgaagtggcgatagaattgtatcgccttttcagttgattcggagttgattcctccgatgacccggtcgttctgcatcagttcgtagatgacattgcctggtaaaacgcgctccggacaataagcgatatatatttttccttccagttccggacgcaaagcgtagagcagatttgccatcttttcggtggtcccgacaggtgaagtcgattcaatgacgaaaaggtcccctttcttaagaaaaggtgcgaccatacgtgtagcggcttcgacatatgaaatgtccggttcatgatttcctttgaacggagttggtacgacgatcaggtatacatcgctttcttccggaacatccgatgctttcagcttaccgaattccatgactttcgaacacaactcctgtaatccaggttccacaatatggataatacctcggtttgtcatttccactactttcggatttacgtcgactccgataacttgaatgccgcttccggctgcgataatagctgtaggtaggccgatatagcccaatcccataaaacatgctttcattatttgtattttttctaaattcgtttaacccactcttttccgtttaaaaattcttttttgtttccggccttttcaaaccaaatgcttaatatcacccagatcacgatgtcgccggcaaatacgatattgatattcacgaacgacacgagtaagatattgagactactgaatagactggcgattacgacgatactgatcatcgccttgtgtgcgctcatccccatatcgaggaacttatggtggatgtgattacggtccggtttgaatagtgaccgatggctgcgtgcccgtacgatcattacgcgcacaacatcgaacatcggtacgatcagtgtcgagaaggcgaccacgatggcaccggcggaatagtgtgcaacatccggattgtaagatgcatagcggatggcgaggaataccagaatatagcccaatgtcaagctccccgtgtcacccatgaatattttcctcccgtgatcagcttgtccgaagacattgtaatagaagaaaggcaccagcactccaagagtcgcgaacgacagcagggcgtatatccacattccgttaatcaagaatagactgccaagcacgagtaatgccgagccagtcagccctgaagccaatccgtcgattccgtcgatcaggttgatggcattggtgataaatataattacgaggatagtaagcggaataccgatccatgatgccagttcgtgtattccgaataacccgtagagattgttgatccatagtcccgacaatggcaggagcaaggctgccacaagctgtaccatgaacttctttgtataacgcattcccactagatcgtctttcagcccggcgaggtagagcaagatcaccccgcagaccaacaggtagaattctgaaagagtatgtgtgagtaaccatagcggtatttgctgtccgtgcatgtattccgcgcaatagagtgcggaaacaaatgagagggagaataggattgatggggcgaaagacaatcctcccagcctcgggatagcttctttatgtaccttccgactgtccggaatgtcgaaaagtcgctttttcagcgcgacgaccaaaatcctcggaataatgatcatcgacatcagggcagagatcgtgaaggccaatagaatcaataggtatatcatataacaaatttcggtttatatgtgacaaagttcgtcagtcacattagatatgttctggcgattgtccactattcttatagtttgagaagtaacaagaggcaggaataaaacgttttgtcttttgattgtaattgtggtattttagaaaccgtttcctaaaaataatggagaaaatacggagggatgggatttgtataatacggaaaagaacaagaggtatgggttatgattcaacctatgcccgcaagtcatttcctaagcagaatgcattatatatgttaataaggaaaagaatatttagcgagtgctaaaatgctgttttcggcagtggtgaaagagcattatatggccttctatcgcctcagtgtgtgaaggtgtcggtattcaatgaaacattctttcgcatgaaccatctgtctggcagttatccgacttctttttcatgccagtccatttttaatttcatgccagtctattcgcaaatgcatgccagtgcatataaaactccatgcatgttacttaatggatggagtttatcggcttgcatttgtcctgtaattataaccggagacatcggtttgacgttttggaagatgtgtcaaattgacattaccggacgcggatgacgcagaataccgatatttgacaccctcagggaatttatttttttctcaagaactttttgcctaaccactttcttaccggttcgtcgtaaagtttcaggcagaggtaagccaagacgatactgccggcgtagaccactattgccataggccagatttctgcgaaggtatagagttcgttgtcgattagccaagcatagaataggtacatgatcgggtagtggacggcgtagagtggataggatatatcacctaagaatttacatatttgcgtcgaacgtttgtccgtagttttgccggaggctccaagccagacaaggacggggaaaatgaggatgatacaagctgcctcgaatagtccgttgaggctgataggagcagtgtctgcttttatgtaaggcacacagaagaggatcagtagaacgatcgagcaaatccagaaagcacctttcatttggaacggtttaaagttgcgggataataacattcctaacgagaaaggaaagagcatacgcagagaacctccgaggaaatttacgccgtcaagcgtccagcctacaccgatcatgtcatatcccgaaacatcgaatagagtgaatccggcaagccctgtccccaaaagaacgacgagtacggtcaaggctttagtggaaaggcggtgaatgaaaaccgcgtaaaggatgttgccgatatattcgaaaaagagcgaccagcttggaccgttgagcgggaacatttcgccattgccgcgtacttcatatctcgcaccgggtagggcgggaatgaaaaacatcgcacagagcgtggatagcatcactgccgagattgccacatgtttgccatcccattgaacactgccttgtatgaagaaagcgatcgctcccaatatcactcccatgataatcatcggatggagacggattaggcggcgtttgaaaaagttactggtagtcatggtctttcccaaacggtcgtcataggcgtaaccgatcacgaaacctgaaaggatgaagaaaaaatcgacggccaggtagccgtgattgatcgttgtgataggtgttcctccggcagcaaacgaaagaccttcgaaaatgtgataaaagacaactagtaaggctgccacccctcgcagtccgtcaagaagttcgtaatggggtttggtatccgcaaatgcggctgaagagattgttgtgtctgacattgatattgaattagatatttgtaatatgtggcaaaagtattcgttttgggggataaaaaatttgtcctatgtcaaattcgattatccgtttgcccggagcctgctgagtgtagaaagtctgatacccaggtaggaagcgatatatcctaagtttactcgccgatatgcgtccggaaattgttccttgaacgcttcgtatcgctcccttgccgacaaggtcaaatggtctttgtggctgcgatgcaaacgtctgtattcgttttgatgaatgattcttccccagttgcacagttcgatgttagtttcgaaaagatgcgtcagagtagccagcgatatctggtaggcttccacctcttccagcgtttcaacgtattcttcacttatctttccgtaatacagttcatccatactgaacacaatgcttccttctccggcaaacgatgtcgtaacctcctctccgtctactagccagaaggaacgtgttattcccttctcgatgaaaaaggcggatttgcaatatgtgtctgcttttatcagctgatactttttagggaagcggcagcaagttacgttctctttcaatacttgaacggtatcgtcggagataggaaacaaagagtttattttatttaatatatttgtcatgatgttactttggcattgtctgtcaatcacaaagatacgcaaaactggtaaaagacagttggcaaccgcgcagtaattattttactacatggttgccaaccgccaatagagttattacactgttcttacagccattcgctcatgaatgcatccatctcgtctgcatgtgcttcgaggctttggagcaatttgaactgagccttcgtgcggatcaggttgtgcttcggactgtgtatcttgtagtatgtgtcaccgttgatgtaatcggttaggaaacggactgtctgcatgtaagtcagtaagcggccgccgtacgggagcagtttgatttccatcggagtcaggaatgatttggctttctccatatagccgcgtgtgtaagctttaaagatatccatgttgacattgacattgtcctggttttcgtcatcttcggcaccggtattggctcctgtgcgaatgaagtcgccgatatcagaaaggacgaagcccggcatgaccgtgtcgaggtcgatcacgcacaagaccttgtcggttttggcatcgaacatcatattgttgacctttgtgtcgcaatggttcgtgcgtttttttagtttgccttcgcgataaagacgttcttggatacacatagcttcggcgcgtttttcaatttcctcgatcaagtctttcacttcgtccagacggccggctgcattattctttactgcatcgtggaactgctccagacgaaattccatattatggaagttcgggatggtttcacccagtgtgccttccggaatgtcggccagcatggattggaagtcgccgaaagccttgcctgcttcgtaagacagttccggggtgacctcttcgtagcttttgctgtttgggatgaacaggcaaacacgccaatagttgtctccgtcgaaataatacagtttgttatcttttgtcggaaggaaagtcaagactttgcggtcaatatcattttcacctttttcttccagtttcttacggatatgcgaagtaacaatctggatattgttctgcaacatatccacatttgtgaagatcaggtggttgatgcgttgcagcacgtatttgatttcgcctttttcgtttgttactttcagcgtatcgttaatgtgtccgtttccgaatggttcggcggaaactaccttttctgtgagctggaactgatccaggatgtttagtaattgttctttcgtttttgccatggcattatttaattgatataattgataattgacaattgacaatgaaataagggtatagattcactccaattatcagttacgcacaaaaataagaatatcttttgtaaataaaaaaggaagttgctttctttaatgggagtctcctgataaaaaagaaagaccgtccttttcagaacagcctttctctatttgttatctaaaccaattatcaattggttttatttcttgttacggttaccatagcggctcatgaacttatcaacacgtccggcagtatcgaccaatttggccttacctgtatagaacgggtgagaagagcttgagatttcgatctttaccaacggataagtaacaccgtcaatctcaattgtttcttttgcattgatagttgaacgagtgataaatacgtcctcgtttgacatgtccttgaatactacaggacgatagttgtcaggatgaattccttttttcattgctttgttatcttattttttaatttatattctcttatacttgagtttggtaaccggtattttgggttgcaaaggtatggattagagttgaacaaacaaagaattttggattattttttcaatcagacctacttttgtgttattttatatgcttaaaagcataatgttctcggatagttattatctttgtggaagatttttaatcattaacgtaataacatatacaacaatggtaaattacaaagatttaggtttggtgaacacaagagaaatgttcgcaaaagccatcaaaggcggatacgcaattccggctttcaactttaacaacatggaacagatgcaggccattatcaaggctgctgttgaaacaaagtctccggtaatcctgcaggtatctaagggtgctcgccaatatgcaaatgcaactctgttgcgctacatggctcagggagctgttgaatatgctaaggaattaggctgtccgaatcctcagatcgttctgcacttggatcacggtgatacgttcgaaacttgcaaaagctgtatcgattcaggattctcttctgttatgatcgatggttctcatcttccttatgaagaaaacgttgccctgactaagaaagttgttgattatgctcatcagttcgatgtaactgtagaaggtgaattaggggtattggcaggtgttgaagatgaagtttcttctgaccaccacacttataccgatcctgaagaagttatcgatttcgctcaccgtacaggttgtgattctttggctatctctatcggtacttctcatggtgcatacaagtttactccggaacagtgccatattgatcctaagactggcaagatggtgcctcctccattggctttcaatgtattggatgctgtaatggaaaaactcccaggattccctatcgttcttcacggatcttcatctgttcctgaagaagaagttgaaactatcaacaaatacggtggtgcattgaaagctgctattggtattccggaagaagaattgcgtaaagcagccaagtcggctgtttgcaagatcaacatcgattcggattctcgtctggctatgactgctgccgtacgtaaggtattcgcagaaaaaccggcagaattcgaccctcgtaaatatctgggcccggctcgtgataatatggaaaagctatataagcacaaaattatcaacgtactcggttctaacgataaactctaatctttttttacagaacgatatatgaaggggtgcttgtcggtacccctttttatttgtgtttttgtaacgtataaacatgagtaagaatagataaaaatgaaaaaaaattggattttggggatggccgtttgtggtatattgtctgtatcggattcggcgtatggacaatcaattaaagacattttgaattctgctgccgtaaaagacgccgtgactactgtgaccggaggaaaaaagctgacagtggaaaatttagccggtacgtggacgtatgtgaatcctgccatccagttggaaggcgataatgctttgaagaatgtggcggcaagtgtggcctcttcggagatggaaaagaagctgaaggattattgtgcgaaaatcggaatcatcgaaggggcattcaattatacgtttaataccgacagcacattcaccagtgtcctgaaaggctgtactttgaagggtacttattcttttaatgcggacgataagacgatggaactgcactatggcaagatcgggaaatcgaagttgacgacgatgacggcttatgtcgttgtcaccaatgaccaactttctttgctcttcaatgccgataaattactggatttcctgacaaaactgtctgctgtctctaaaaatacgaccttacaagcactcaataagttggcgagccagtatgatgggatgatgatggggttcgagttgaaaaaataaataatgtgccaatatgccaatgggaaaatgctcatatcattagtatattggtgcattggcacgttatagcccttgcctgtagtcgtctacgatttccagtagctttgcgccatagttttcgacgatctttttcccgataccggggattttgaggagatcacgtccgctggcgggtaaggtgttggctaccccgatcagggccttttgttgcaggatggtataagttggaagtcctttttcggttgctacctcatagcgccagcgtttcaggttggcatatagttctggatgtttgatgtctgtcgatatttccagtttagccggctctgatgatttttcggaacgtttgcgtgtggtcggaacagacggttgttcgatgcttgctttggccttagccgacagatagccggaaattgtgaatccatcttgacaaccttgcaaggttgacagtttgatacgaaggtcttcgttccacttgtctaacgcattcttgattgttttgcgtgtttctttattgtctatttccacattcgatgcttcctgcaatggggtgcaaaggcgatctatttgctccagaaagtaagccacgcctttccggacacgctcttggatcgtttcgtctttcagataatcggtattgcctgttatcagccgtttcaattgctggatgaatcgttctccgacatctgtgaccgtggaacggaatgcgtcgcgtgtgttggaatactgcacgctcagttccggatataatttttgcagattcccgtacacgacaaaggcggcatattgtatgcgctgctgaagattgttgaagtcaaacagttcacatatcagttccgtgaaataaagttgctgtgcggcctgcatttgctcttcacgcggctggcgactgtcgaccgatgaagtgaattcctgtatccggtaatcattgatcatggcgttgcgggtgatctgactgctcaacacaagaccttccaacgttttgcaacggctgagtgcgacatatacctgtccgtgcgaaaaagcggcagaagcatcaatgatggcatgctcgaaagtcaatccctggctcttgtgtatggtgatcgcccaagctgtttttaacggatattgactgaaggtgccggtaatggtttcggtgatttcctttgtttcgggatcaatcgtgtatttcacattgttccagatttccttttcgacgacgatctcgtttccttctcggtcgactacggttatcttgttggggttgataaatacgatctttccgatcttcccgttataatatcgtttttcggaagacgaatcgtttttgacgaacatgacttgcgcgccgcatttcaagattaacttgtcgtcggtcggataagaatattcgggaaagtcgttattgatctcagctgaaaaagtgtaaggctgtccgggaagttccgtcagttttcggttgttgatctgctgtgcctggtagttatgtgtcgtgagtgtgatataacccgattgttcgtccggtctgaagttggggatgtaccgctggttcagacgttgcaaggtcttgtcgtcgaagcggttctcacggatattattcaacaggttgatgaaatttgtgtcgctttggcggtagacatgtgtcagctcaatacagaaataattgctttccaacagtgccttgctgtcgaaaaagaaggtggacggatagtgctctttcagcagattccattcatcatctttggcgacaggagctaattgttgtaagtctcctatgagcaataactggacacctccgaaaggtttactgtgatctttataacgacgcaggacgtcgctgatagcgtccagcaagtctgcgcgcaccatgctgacctcatcgatcaccagcaagtccatactgcgaataatattgattttgtccttgcggaattggttcttgaaatctgttttgcctccccggtattccggtgaagacggaatgtaaggcccgaacggcaattggaaaaaggagtggatagtgacgcctccagcattgatagcagctactcctgtcggtgcaacaacgatcattcgtttaggtgaaacctctttaagcctttttaaaaaggtagttttgcccgttccggcttttcctgtcagaaagaggttggttccggtgttctgcagcaagttgaaggcgaggtcaaactgttggtttgtttgcatggcgatttgtgatattgttaatagtcacaaatatatagaaaatattataattggcaatgtttttgatacggattatgaggttgcgaccctcataatccttatacaatcaatgcggcgatgaactggataaaaagaatcaggaacaccatcgcaattggatagaccgtcgcataggcgatgctgggagcagaactgtcgctcatcgaatcggcggcggcaagtcctggcgtactggtcattcctcctgcgatcgtcccgatcaagtctaagatgtggattttgaatacgaaatagccgaacaagacagccacgatcatcggtactattgtgattgccataccgattccgaataatgtccagccgctttcttggaatgtcgataccaggttgacaccggcggatgttccgacctcggcgaggaacagaagtaggccgatctgacggagtaactggttggcggaacctgacatggaccagatgatcggtcccgttttgccaattgcactcaggataagtgcgacaatcaggatgccacctgtcagtccgggtgagaaagagaaggagtccgaaaacgaaatgttcagttttccgaacaatactccgaggacaataccggctgcaatcgggaaaaagtccgtgtcggaaagttttttctcgtcattaccgaacacctgtcccaattcctttatgtcttctttttctccagcaaccattaacttgtcgccgaatttcaacattaattccggttcgggtgagaggtcgataccgcttcggcgtacacgagtaacggtacaattgaatgtgcgttgcagattcaggtatcctaaacttttattaatgacgttcttgttcgtcaccaatagagattgcaattcctgagtgctgccgaaaggaaggtcgttctctacacgttcaccgacaagaagtgccagttgttccaaagacttgtcgttaccgacagccttgatcatatctccttcatgcaagatggtttgcgctactggtatgcttgtccggtctttatgttttatacgggaaatgacggctcccgtcatggaacgaagttgtaactgggccagtgtttttccgaatatattggcgtgggtgatacggaaagtcgccgtatgcaacgggggatatttcccttttcgctgtacttcgagtgccttggcttcggcgataaggtctttgcgcaacaatttcggcaatacttttataaaaagtatcacaccgatcactccgaacggataggcgatgccataggcgatggaagcggaggaggagtgcgtgctgtcgatcgcgacggcaagacctggcgtactggtcagcgccccagcgatcagtccgacgaggctcggcgtatcgattccgaccacatatttaagtatcaaaccggtaaggctggcagatccgacaatcagaagcgttagtatgatcaatgttttccctttcgaacggaaggagtcgaagaatcccggacccgcttgtatgccgatggtgaaaatgaacaataccaaaccgaaatttcccagttccttaggaatgattaccccgaagtgcccgaataggagagcgataaagataacggctgatacgtcgagagagaggcctttgatctgtattctgcccaatatgaatcctaaggcgataatcaggaacaaggcaaaataagacgattgaagcaatgtttcaagcatgtcaaatagttttgttgtgaagatttatgtttgcaaaattacacttttctgcctgtatagacaatcccttggcgagatttctgttacctttgcatccgaaatcaaacataagcaaggatatccggacgtgaacagatactttatatatttaggttataacggtaaaaagttttgtggctggcagatacagccgaatggaatcactgtgcagcaatctatcgaggaagctttggctacgttgttgcgccaaccggttccgatcgtgggagcggggcggacggatgctggtgtgcatgcccgcctgatggtggctcatttcgactggcaggaaccgattgccgacctcgctttcttagcggagaagctgaaccgtttgcttcccaaagatatcgcggtctaccgtattgtacctgtacgtcccgatgcgcatgcccggtttgatgctatttcgcgtacctataaatattatgtcacgacgcggaaagatccgttcaattacgagttggtctataagattccgggaaaactcgatttcgaggcgatgaataaggcttgcccagttctgtttgactacatagatttcaccagtttcagcaagctgcatacggacgtgaagacgaacaactgtcgcatctataaggctggttgggagagggaaggcgatgtatgggtttttaccatacaggcggaccgtttcctgcgcaatatggtgcgtgccattgtcggtactttactcgaagtgggcagaggaaaactgacggtcgacggtttccgccaggtgatcgaagccaaagaccgtggacgtgccgggacttccgctcccggacacgctctctatctggtcgacgtcacttatcccgaagaactttttcagttggcagtcggctgttgactgttgtgtttttccggtctaaaaaatattattcagaaactttcaactttcaactgttatgtggctcggattagccttcatctccgccttccttttaggttgttatgaagtaaacaaaaaaatttcgctagatggtaatgccgttattccggttttgtttttcaatacattgataagcagtcttatctttgtccctttcatttttctttcgttttttacggatgtgctcgacgggacgatgttgtatgtgccgcgtgtctccttagagacacatgtggcagtgtttataaaggccgtgatcgtcttgtcatcgtggatattcggctattttgccttgaagcatttaccgctgaccattaccgggccaatcaaagcgacgcagccagtcgtgacgttggtgggagccatgcttgtctttggtgagtggctgaacctgtaccaatggatcggggtgattctttccattgcctctttctacctcctttcctcatccgggaaaaaagagggaatccgttttacgcataataaatggatcttctttaccgtcttgtctatccttaccggagcggcgagcggcttgtatgacaaacatctgatgggaagtctggatgtgatgacggtgcaggtctggttcaatgtctaccagtgccttatgatgttgccgatcctcttgtttctttggtatccgcgccggaaaagcacgacaccttttgtctggcactggaacattatctttatatccgtcttcctctgcgtggcggactggatttacttttatgccttgacttttcccggttcgatgatctctatcgtctcgatggtccgccgtagtaatgtcctggttaccttccttgccggtgctttgttcttccatgaaaagaacttgaaaagcaaggcaatcgacctgtttttagtattattaggaatgatattcctgtatctcggtacgcgctaaggcatattctattacttttgtagatgaaaattgtagattaagatatgaaacgattatttctttctatactgctttgtgtatttgtgtgggggatgaaggcacaggagatggatgcggtctttgtcgccatgcctgaccaatatgtaccccagctggaaaatgcctggcgtaaggatttgatagatttgtataattcaggaaaggaagcgaagctgaaaaacaccatgaacggcttttccaccttgaagaagctgacggacgattacctgttgttgcaggtgacggagcgcagcacggtagagatgaagctcttgccgctggtcaacgatacctatgtcgtttgtatgatcacgaccgtatacggtcctgttcccgacagccaggtcgagtttttcacgacagactggaagctgttggactctgctgatttgtatactccggttccagtagaatggtttattaaagacgatgccgacaagaaccgcaccgcctttatcgaagcaactgctcgtctggatatggacttacggaaatattcgcttagccccgacgaccagacgttgacggtcgaatacacgacccccaaatatttgacgaaaaccgaacgcaagcaggtggaacctttcctgaagaacattccaaaggtctatatctgggaaaagttccactttaaataaaagggggggatataaatctaccagtcgtatcccggagcaatggtcgaacttttgattacgatcttcgcttcggagtcgagtatgatatgtatctcattgttgtcttgtttcagttcaaaatcgtagaacaggccgtccggccgttcgattgccgtgatatcttctattttatattggttgtaggcggagctttgcaacgcatccataacggcgacaggaacgtcgcgggcgctgatttcccaatgtgtggagacccattgctccttcgtgtcgaaccatacttctttgtgcagattcttttcttgtatatccacttccgtcccgttagtctctttttcggatttcaggatcgttgcggccggatacttctgtttcaagaagttccggataggagttgcgacgttttcggcaggtgttttttgtttttgccggttgttgctgcatgcggcgaacagtgtgaggctgcataagtacaatagcaagacggataatttagttttcatgacttgttgttttttattgttactattcgtggcgagttcccgatcgaactctgtctcgaaagaaacaattcttttgtcttcatggttgtccgccacgataataatatgccttttttatttttttcgtttttctcatgttatgttttcgtttctttgtcgtcataatagtagaaatggaactcgaaacgtttaaaataaccgtgctgccgcttcgggagaagttgatcaatatttcctggcggatgatagaggacaggtcggatgcagaagacatcgtgcaggagacttttctgaaattgtggcagattcgcgagaagctggatggttataacagtgtcgaggcgctggctgtacaagtggccaagaacctggcgctggacaaactgaaacagcatcggccggaagggacggatatagccttgctttctcttgattcgggaacaaggaacccggcggaagaattggagcagcacgatacggttgcccgtatccgttggctgataagtaagctgccttcgctacagcaaaccattatccggatgaaagatgtcgaaggatatgaattggcggagatagcggagatcacaggcactcaggtcgaagcggttcgggtgaatctttcgagagcccggaaaaagatacgggaacagttaatgaaggagttatgatttataatttgtgatttatgggaaagaggaatctacatatgatagaggagttgctggaacggtacttcgatggtgagacttctgccgcggaagaaaagcagatccgtgcctttttcgcttcgggagaggtgccggagcatctggctgcctatgctcctctgttcgcttatttcgacgaagaaatagaacgtgatgcggaagcgcaagttggcgaaccggatttggaccccgaaccggtatccgttccgttccgctctgcgaaccggaagcgtgcagccctttacctcttttccggcgtggcagcttgtgtactggctctgttgggagttacccgcctgctgtatcccgctgatccctgtttctgttccgacagctatgtcgtgataaacggccgttgctataccgatatccataaagttcgttcattggcgatcgaagcgttgctggaagtggccactcctgccgatgattacttcccggagatggataaggatgaggcagaccgccgaataatagataaccagttaaaagaattaggtagtctttttagtgaagacgaataaaagaatatcaagatgaaacagttgaggtataggctattaataatgttggcagctttgatgctgttgccgaccggtgtgggagctgccgaagcgcagaaagacctgaagatacaggatgtctttacccgttacggtaaaaagaggaatgtcacgatggtggagctttccaatgaaatgctggaaacatacggtatgacgcgctacaagagcatcacgatcaaggacgatccggaagctcttcgctttacccgccaatgtctggaagccgatcagcggggagcacgcaagatcaaggaggtgaccgacgacgggggagtggtctccgcttattaccagcttccgggcaaagacccggacgtgaatcgttttgtcctgttcaaagtcaactccaaagggacgatcacattggtctatatcgaaggagaattggacagcgacgacctgatcacccttttatttaccaaaaaagatttataaacagataaacaagaaaagatatgaaaagatttttactgatcatagccgcatgctttcctgccatcggattgctggctgcagatgttgaaccgatgccggccgatacggtcatccggttggaaaacaaacgtatcgtagtgaaggacaacggcgaacggatgaaagtgaaagtgtatgaactgaccgaagaaggcgattcgatagaccgtgaaatgatcttcgaggggcattaccgggacggacagagttacgaacggcgcaaacatatcaagtcgatcaatatcccgatcccttcttgggacaaagattttgatccgcactgggcaggcttcggcatgggcttcgccaacttctccggtagtgacgggatcaacgacgtagacggtgtttcgcttcgtagcggtaattcgttggaatataatttgaattttatggagttcagtttccccttctcccgttatagatgggcggtcgtgaccggggccggtatgcgctggagccgttatcggctggatatgaatgctcattttcaggaagtggacggtgtgacgcagttggttcctgctcccgaaggcatcgtttataatgccagcaagttgaatatcaccagcttgacgattccggtcctgcttgaatggcagtcgcctaaacatcgtcgcaaggctccgcgtttctttatctcaggtggggtggtaggtgtggtcaaaactatttcttcttccaaaatcgtctatcatgatgcggatggcgaaaaacgtaagaaaaagatggaccgtggcatgaaccttcgtcctgtaacaatggattttctttttcaggcaggtgtcggttgcatcggtttctatgccaaatattctcctttcggcctgtttgagaaggacaaaggcccgaaggtgcatccagtttctttgggattgcagttgcatatttaatcttgttgggcatcattctttagggtaaggattaatcatattggatggtttgaaccgtaacatggcataaactatttcgaaagtcatagtaaactaatccaagacatacatcatattattcatatgtagtactacctatcacgaatacgtagtactacatatcgtctataggtagtactacgtatagacaatagatagtgactaccaacagatactttgctatatgtaattagttagttcttggggtgttttgacttagttgatggcatgaaacggcttaatttaccagttgtcagaggttcggtttcagatagtgtcggtaaggtgtcggtatcttttgcatttttccatataaaattcatttacggctcatagtattgccaatattgaatgtggattatagaaccgcgtttctgatatatagtatgaaaagaaagacttgggtgttcgggattcaacaatttggccttccagcttgttctatctccgttattaacaaataaaacacagatgattatggctggaataatgaacactttgtgggacgaaagttccgaactggaggatgaaatgctgacgccgcatccgatcttgtccgatgattacacggctcatgacatgacaaaattggacgaaacgattgaaaaggcggaagaaaacgagaagattattgaagaatcgttgaaaacgtctcaggataagtaatttgttcccggctgtttcgtaagtttgcggacagccggttttttcgctttatgtagcactctttaatagttggtgataggaaattattatcataccttatatacatattgaaaataaatccctatttttgtgctctaaaacattaaaataaacccaacaaagatggctgcaacaaaacgtattaaacgtgcattggtatcggtataccataaagatggattagatgaaattttgaagaagctccaccgcgaaggtgtgagttttgtgtcgacgggtggtactcagaagtttatagaagagctgggactcccgtgtgatgcagtagaggacctgaccggctatccttctatcctgggcggacgtgtgaagacgcttcacccgaaagtgttcggtggtattttgaaccgtcgtgataatgaaggtgaccaggcccagattgcccaatatgaaattcctgaaatagacttggtgattgtcgacctgtatccgttcgaggaaacagttgcttccggtgcggaagaacaggcaattatcgaaaagatagatataggcggtatttctcttatccgtgccgctgcaaagaattttaaagatgtagtgattgtagcatctaaagcccagtatcagccgttgatgcaattgctgaacgaaaaaggggctgaaacttctatcgaagaccgcaaatggtttgccaaagaagcgtttgccgtttcttcaggctatgattctgcaatcttcaattatttcgatgaccgccaaggctcgcatttccgtgctgccgtggatgatccgatgcatctgcgctacggtgaaaacccgcaccaggctgccaagttctatggcaaattcgataatatgtttgaccagttgcatggtaaggaaatctcttacaacaacctgctcgacattgactctgctgtaaacctgattgacgaattcgacgaactgacgttcgccatcctaaaacataacaatgcctgtggtatcgcatctcgcggtaacgtggtggatgcctggaaagatgctttggctggtgacccagtgtctgccttcggcggaatcttgattacgaacacgactgtaaacaaggaagtggcggaagaaatcaataagattttcttcgaggtgatcatcgctccggcttatgatgccgatgcccttgaagtcttgaaacaaaagaaaaatcgtatcatattggtccgtaaggaatgcaagacttgtccgatgcagttccgttcattgttgaacggcgtgttgatgcaggaaaaagaccttagtattcaaggagaagccgatctggaaccgatgacggaaaagaaaccgacggctccagaagtggaagacttgttgttcgccaacaagatcgtgaagaacagcaagtctaacgcgatcacactggtgaagaacaaacagctttgtgcaagcggtatcggacaaacttcacgtgtggactctctgaagcaagctattgagaaggccgtttcattcaatttcgacctgaatggcgctgttatggcttcggatgcgtttttcccgtttgccgactgtgtggaaattgccgacaaagccggtatcaccgccgttatccagccgggaggttctattaacgacaagctgtccgttgattattgcaacgaacatggtttggctatggtcaagacgggtattcgtcattttaaacactaattggaatatttatgatttatgatttatagttgattgggttttcagtctgtttgtgagtcataagtttataggttataaatcataaatgataaatcagaaatcaaaaaatgggattattttctttcacacaagaattggcaatggacttggggactgccaataccattattacctgcaacgataagatggtagtggatgagccttccgtaatcgctctggatgctcgttcggaaaaggtgctggcggtagggcgccaggcacgtgagatgtacgaaaagaccaatccgaatattcgtacgatccgtccgctccgcgaaggtgtcattgccgacttctacgctgccgagcagatgatgcgtggattgatcaaaatggccagcggacgcaaacgctggtttgctccttcgctccgtatggtgatcggtatcccgtcgggtagtacggaagtggaaatccgtgccgtccgcgactctgccgaacatgccggtggccgtgaggtatatatggttttcgaaccgatggcagccgctatcggggtcggcatggatgtgcttgctccggaaggaaacatgattgtagacataggtggcggtacgaccgagatcgcggtgatttcgttgggggggatcgtttccaacaagtctatcaagatggcgggcgacgacttgacgaacgatattgtggaatatatgcgccgccagcataatatacgcgtcagcgaacgtatggcggagcgtatcaagatcaatgtcggctccgctttaagtatcctcgaggacgctcctgaagattttgaagtctgcggtccgaaccagatgacggctctgccgatgaaagtgcctgtttcctaccaggaaatcgcacattgtttggacaagtcgatttcaaagattgaagccgccgttctgagcgcgttggaacagacgcctcctgaattgtatgccgatatcgtaaaaaacggcatctatctggccggtggcggcgctttgctgcgtggtatcgacaaacgtttgcgcgacaagatggggatcgaatttcacgtggcagacgatcctttgcatgcagtagcaagaggtacggggattgcgttgaagaatatcgacaagtttaatttccttatccggtaaatataagttgaaagttgagagttgaaagttgaaagtaaacaagtggtgtacttgctgaatattcaactttcaactttcaactttcaattttcaactgattatgcgtaaactcctggattttttagtcagaaagaggcattggttcctattcattttgctagagatcatatcgttgacgttggtttatcgcaataatgcatatcaacggaacattatgttcagttcggcaaatgtgataaccggacatattacttctgtttccggctttgttacttcctacctgaacctgcgtgatataaatcgggagcttctggagcgtaacggacaacttgaaatggagttgctagagttgcaggaccagttggagatgatgcgggccgacactgctctgtttgtcggttttgcacctgactcgaccggacagtttccgtatagttttgtgatggcggatgtcgtgaacaacagtgttacgtatttatccaattatattacggtgaacaaaggccgtaaggatggagtggagccggacatgggagttgtgtctgaacggggtgtcgtgggaattgtgtcgacggtttccgaccatttttccgttgtaatccctctgttgaatccgaagttcaaactgagctgcaaggtgttggggagtagttatttcggaacgttgagctggaacgggcgtaatgcgcgttttgccaatctggacgagttgccgcgccacgtggagtttgagaaaggagatacgatcgtgacgagcggttattccgccattttcccgtctgggattattgtgggtaaagtcgtgaatttcgaaaaacagcatgatgataacttttattcgcttgaagtggaattggctactgatttccaggccttgaacaatgtgcgtatcataaagaactatcgtcaggcagagcaaaaaaatacagaacgggaggcgaaaaagaatgattaacaatatactgcggggcttcatttattttgtggtgctggtgttggttcaggttttgatcctgaacaatatccatttcctgcgtgtggcaacgccgttcttgtatctttatttcatactgaaaatgccagtggggagctcacggacgaatgtggtgtttttctcttttctgatcgggttgacgattgatgttttttcaaatacgccgggaatgcatgcgtttgcttgtacgctggccagttttatccgtcactcgttaattcagttattgatgggaaaagacctgccggaagggattaatccctcttacaaaacgttcggatatggcggttttttccgctatacgctgctttttgtcgtgattcatcatgtggcgttgtttttgattgagtcgttgacattattcgatccgctgttcctggcgatccgcatcgcggcgagtgtggtgacgacaaccttgttaatttgtacaatagaagcattcaatatagggtcccagaaaagtggagattaatacgaagtatactcttgagaacaggcgtttcgtgattggtggcgccgttgttctgttggttctcatctttatcattcgtttgttctttctgcaagtagtggacagcgactataaagcgtgggcagacagcaatgcgtttctgaaaaagacactgatcccttccaggggtatcatttatgatcgcaacgggaagctgctggtttataaccagccttcttatgaagtcatgttggttatgcgtgagattcaaccgttcgatacgcttgatttttgcaatatcctcggtattacaaaagagctgtttgtaaaacgtatagctgaaattaagaacaggcggttgaatcccggctattcttcctatgtcccgcaggtgttcatgaatcacctctccgcacaggaatgcggtgttttgcaggaaaaactgtataaatttccgggtttttatattcagaaccgtacaatccgggaatatgaatatccttatggagcccatctgttgggtaatattggggaggtgaaccagggggatatcgagaaagatccttattatgtgcagggagataatgccggacgttcaggtgtggaattgtcttacgaagaggctttgcgcggcgttaagggtgtggagattctgttgcgtgatgcgcatggacgtataaaagggcggtatgaagaaggccgccacgatgtggctcccgtgtctggtaagaacctgacgctttcgatcgatatggatttgcaggctttgggtgagaagctgatgcagaacaagaggggtagcattgtcatgatcgagccggaaaccggggaggttctgtgtctggtttcttcgccttcttatgatccaaacttgttggtcggtcgccagcggggaaagaaccatatcatgctgtcgaaaaattcggacaagcctttgctggatcgtgccatcatggggcgttatccgccgggatcgacattcaagccgacacaggcgttgactttccttcaggaggaagtgattacgacagaaaccttgtatacttgtgcacatggatatacaggggcccggaacggcaaaccggcctgccacggccatgcttctcctctgaatgtgacttatgcgctggctacttcctgcaactcctttttttgttgggggctgcgtgatatgatcgatagccgtcggcgttattcgagtgtgggagaggcgtttgaagtttggaagaattacttggtatctatgggatacggttataagttgggcattgacctgcctggggaaaatagaggctttttgccgaatagcgagtattataataaatatcacggtaaacgttggagttccagtaccgtcatttctattgcgatcgggcagggtgaagtgttggctacgccattgcagatttgtaatttggcggcaaccatcgctaaccggggatattttattactccgcatgtcgtgaaggaggtacaggacaccccgctggattccctttatacggataaacgatacacgatggtggaacgcaaaaattatgaaatcgtagccgaaggtatgcggaatgccgttataggcggaacttgtcggggagcggctataacggatatcgaagtctgcggcaagactggtacggccgaaaatccgcatgggaaagatcactcagcttttatcggttttgctccttatcggaatccgaaggtggccatctgcgtgtatgtggagaatggtggtttcggtgcgacctacggagtgccgatcggcaaattgatgatggagaagtatctgaaaggcgaaatctcggaggagaacaagttgctggaagagacgatgtcgaatgcggttgtatcgccaaacgttttatctttaccgaatcgtgagttataggaagacggaaatatggaagacggttgactggttgacgattatcctttatgtggtgttggtcgttgccggctggttcagcatctgtggtgctagttatgaattcgataacgtggggttatttgacccgtcgggccgtcccggttcgcagttgatgtggatgggattgtcggtagggttgatctttgtgctcttgatgcttgagagtgagttttttgatgtttttgcctatctgatatatgccggtttcatcgtgttgctgattgctacgatttttctggctccgaacataaaaggttcccattcgtggcttgttttgggacctgtcaggttgcagccggctgagtttgccaagtttgcgacggcacttgctgtcgcgaagctgatgaatacctatggtttcaagctgactgttcctaaaaactttatagccgtcttgtcgctaatatttctgccgatgatttgcatcctgctgcagcaagagacaggttcggcactggtctacttggctttcttcttgatgttatatcgggaggggatgtcgggatatattcttttgtcgggagtctgcgcggttgtcttttttgtcaccagcatgaagttttcggatgtgacggtgggagatacggcggtgggagagttgcttgtctcttctctgatcctgttgatcacggttatcctgatacagatagaaaggaaagatacccgtgcaatacaggtgatattggggactgcgggtgttgcttgtttaggagggtatgccgcttctttctttatgccggtcgattattccctgatatcgatcggggtgatcttgctggttgcctgttatctggtttttctttctgtccgcaactgggcgtggcattatgtgttgatcgcagtctttgcattgggatcattggcttttatgtattcggtggattatgtgtttaccgatatcctggaaccgcatcaacagatacgtatcaaggtttcattgggattggaagatgatccgagcggtgctggctataatgtgaatcagtcgaagatcgcgatcggttctggtggacttaccggaaaaggctttctgaacggtacgcagaccaaactgaagtatgttccagagcaggataccgactttatcttttgtacggtaggtgaagaacaagggttcatcggggcttctgcggtcttattgttgttcggatttctgatcctgcgcctgattgtgttggcggagcggcaaagttccactttcaaccgggtgtacggctatagtgtcgcttctatctttttcttccatttggccattaatatagggatggtgacggggcttacacctgtgatcggcattccgttgcctttctttagctacggcggttcatccctttggggattcacgatcctgctttttatcttccttcgcttggatgcatccaggagggaacggtagggctaagggctgctcacttggccgggcgaaccgagaaaccgatttcttgtattcctttcaaagcatcgtcgcgcatcccttggcggaaactgaacgtatattgtccggcatgcggaaacttatattgcgaatgaatgggaaaactgctttggtataaggaaatgccatgtccgtaccatttgccgaattcgtcggcaagcatgcattcgatggtgtcccggtggagcgggccgatcggctgctcttcactgcagaaaagccataagttctgataggggtacaagttattgttccttacttccagtgtcaggtcgtaaggaacagatatatctttcacctcgaaggtgaaatagtattccttgtccttttcccacgtgatattgttgatcgcctggtattggtcgtacaaggctgggttttcgcaggaaaagaacagagaacaagtcagtgtggcaatgactcctttaagcttccggctttgtgtccggcttgctttccggtttggcagcaggcttagcttgttgctgaggtttgtcattattcggttgcttatcgttatttactcggttcggacgcggtctgttacggttgttttcgcggttctcccgttcgcggttgttctcccggtttccgctgttacggttgcggtttccgtttctgttcccgtttcctttgccgtttttattttcgttgccggtgttgccgttcgctttttctccgttggaaggtttgctgttcccttcgttgccggtgttggcagcggcttctttcggcaggttttccttgttgccgtttccgttgcgtttctttttcttctttttcagggaagcatcgaaacgggtaacactgtcttgccccaggatatcctgcgcatcgcgtttgggcggttgcggcttggtatcggcttcgagcgtgacaggcttcatgcctttcttgttcatgttgatcacatcgaaggcgcggttggctgagattgtaatcaggttggccgcgaacgatttatcggtagagtaggtgatttcccgtttgaagatatccgttttaaagtgataataggtattgtcctttgtttccagcaccacttcacgggacggtaagcgtttttgcgcttccacataggcgtccacttcatagttgatgcagcatttcagcttggcgcattggccggccaatttctggggattcatggatatatcctgatagcgggcggctccggtggctacagatacgaaactcgtcatccagcttgaacagcacaactcgcgcccacaggggccgatacctccgatgcgtccggcttcctggcgggcaccaatctgtttcatttcgatgcggacacggaatgcttcggcgagtactttgatcaactggcggaagtcgacacgctcgtcggcaatgtaataaaagatcgccttattgccgtcaccctggtattccacatccccgatcttcatattcagtcccaaatcggcagcgatctggcgcgaacggatcattgtggcgtgttccttggccttcgcctcttcgtatttctcgatatcggtcggtttggctttacgatacacctttttaggttcattgccttcgccagtgcggacattgttctttttcatctggagaaggacgagcttgccggtcagtgtcacagtcccgatgtcatgcccggggctggcttccactgcgactaaatctcctttttccagaggtatcttggaactgttgaggtaataccctttgcgggtatttttaaactgcacttccacgtaatcggtagcgtttgccgcatcgggcatgtcgcaaagccagtcgtaggtgttcagtttattattttgtatcttgctgcatccttttttacccatgcagcaacttcctgtatttaatttaaaatccatttgtctggtatatataatgtatttatagtgcgtacaattacgcaaaaatagtcaaaatatttggttcgtagcaaatgaagaatgaattataaagagaaagggcaaaacagaatgttccgttttgccctttttggtattattggtccatgctgatttatttgaccagaccgtgacttttaaatactttgtgaattgcttctaatgcgtagtcgagctgttcaattgtgtgagtcgccatcagtgagaagcggatcagcgtatcttcaggcgcaacagccggagatacgactggatttacgaaaataccggcttcgaacaattcctttacgatcaggaatgtcaggtcgttgttacggataaacaatggaatgatcggtgttgaggtatggccgatttcgcaccccatattacgaaatccatccaaggcatagtgggtaagtttccacaggtgttcgatgcgttccggttcgctcagcataatatcgagtgctgcgccggccgcagctgtagctgctggagtattacttgcactgaatatataagagcgggagttatggcggagatagttgatcgtctctttgtccgaagcgatgaaaccgccgatggaagcaagcgacttactgaatgtacccataatcaggtctacatcgtctgttactccgaaatgattacaggttccacgaccgtgatcgcccagaacacccaaaccgtgggcttcgtctaccattatgcttgcgttatactttttggctaacacaacgatttccggtaatttggcaatgtcaccttccatactgaatacaccgtcgataacgatcagctttaccttgtcgggttcgcatttctggagttgcttttctaaggactccatatcattatgcttatatttcagtttggtagagaaggaaagacggtgtccttcgatgatggatgcatggtctagctcgtcccaaatgatatagtcttcacgtcctgtcaagcaggatacaacacccaagtttacctgaaatcccgtagaataaacaatggcatcttcttttccgacaaattcggccagacgtttttccaactgaatgtgcaaatccaacgtcccgttcaggaaacgcgaaccggcacaacctgtaccatatttcttaatggcatcaattgccgcctcttttactttcgggtggtttgtcaggcctaaataggcgttagaaccaaacatcaggacctttttaccgctgatcattacttctgtatcctgatcactttcaatcattctgaagtatggataaattcctgcggccatagcccgctgaggtgcatcgtactttgatagtttctcttgtaaaagtttcatattataattaacagagaatgattttctcgctacgttgttattctaaaagaacccagatctgcttactactataatatttatgtttcggcaaatccagctgcaaaagtagtaaaaaaataacttatagtagccgaaatgctttaaaagttttacaaaagcattatttttgtcctctcaaagtaagtaacagcaagaatggagggacaaacaatcaatatacaggccattataaatccgatttcgggtgtcggttcgaaaagaaagattccgaaaatgattgaaaccgcctttgcgggcggaaattgttgtgtggaaatttcttttacagaatatcccggacatgccagcgaactgacgcggaaagcccttgataaaggggccaattgcgtgattgcggtcgggggagacggaactgtgaacgagattgcccgtgccatgctccactcaggtgcggtgctggggattatcccgaaaggttccggcaatggtttggcgcgtgaattgcatattccgatggatgtacgccgggcgattgatctgattgtaaaggggcatgtttcgacaatcgactgttgcaaggcgaacggacgtgtctttttttgtacctgcggagtcggctttgatgcagcggtcagccaaaagtttgccggggagaaacgccgcggttcgcttacctatataaaaaatacggtggaagaatatctgagctacaaacccgaaccttatgaacttttgatcgataaccagacggttaaggaaaaggcgtttttggtggcttgcgggaatgcttcgcagtatggtaacaatgcgtttatcgctcctcatgccaatatccaggatggcaaaatggatattacaatcctttcccctttcggtccgctggacattgcaccgttggctattcagttgtttacgaaacagatcgaccgtaacagcaagatcaagacattcaaaggaaaagaggtgactatcatccgtcagaatccaggagtcatgcatctggacggagagccgatcatggcggacagccggatcgaaatctccgttcttcccaaatcattgaacgtattgactccggaaactgtttcttttacggaggaggtacagaatctgtttggtgaagtaacccgttttttcgataagaaactcccttacatctttagataaaagtctttggttagattgatatattcgtcagtataccgatgtcttgcaatctcgatggtcagccgatcggagaaggcgggagaggcgggtggctctgatgtcagttcggccaacagtcgtttcggttgtgcatcgggtacggggatgacggagacttccttcgaaagaaatagattttgtgtttgaatacaatccgtaagacgatctttctggtcgtaaggcaggataagggcaatacgtccttgtggggcaagcagtttgcgactgtactgcaacaaatcttctaatgtcagcgtatcggtgtggcgggccgtgttccgttgtaggttcgggcatttcaatgaatcgacgaagtaaggagggttggatacaatcaggtcatatagatgcgtgctggcttgtgcaaaatcgaccaagtcggaatgaaagacatttatccgtcctgcaaaaagggaagattctgcattttcttgtgcttgaagacaggcatcggcatctatgtcaatagcgtcgacaaccgccttgctgcgttgtgccagcatcagtgcgatcagtccggttcctgtcccgacgtccaatatgcggctgcacgattccgttccggcccatgcgccaagcagaactccgtcggttcctactttcatcgcacatttgtcatgacggatggtaaactgtttgaattggaaaaaaggatttgacatagcaattgataattgataattgacaattggagtggactgaataattgtccattgtcattgtcaattgttttgtgcaaaagtagtcagaattgagttaaaaatagtaactttggcacgtttattgtataaatgaagaattgcgggcgatataagaatattccgcaactatgacaaagaatatatgaagaaagataaagtaacgatgtttgccgaggagtcgtataacgacttggatgataatattggtatcgtaatgcctatcctcacagattgcgatgttgatgaagattttactgaaggaatggagaaagtgggagaggaattgcccattcttccgcttcggaatatggtactgtttccgggtgtagctatgccggtgatgataggccgccctaaatctatgcgcctgatcaaggaggccgcccacaagaaaagtctgatcggagtggtttgccagaaggatatgaatacggaagatccgaagatagaagatttgtatgcgacgggagttgtggccgatattgtccgcgtgctcgaaatgcccgacggaacaacaaccgtgatcctgcaaggtaagaagcgtttccaattggaagagctttctgcttatgatccttacctgatcggaaagatcaaattgctcgaagacgtcatgccggacaagtccgaccgtgagttcgaggcgcttgtttcgactatcaaggatttgacgatcaagatgctcggagctgcctctgaaccgcctcgcgacttgatattttcaataaagaataataaaaatattctctacctaatcaatttctcttgttgcaatgttcccaacggatcgtctgaaaaacaagatttgttgttgattggtaacttgaaagatcgtgcgtaccgtcttttgttcatcctgaaccgggagtatcagttggtggaactgaagacgtccatccagatgaagacgcacgaggatattaaccagcaacagaaggaatactttcttcagcagcagatcaagacaattcaggaagagctaggaggaaatatcaatgatttggaaataagggaattgcgagagaaagctgccaagaaaaaatggtcgctggctgtagctgaaacgtttgagaaggaggtgcgcaagttggagcgcctgcatccgcaatctccggatttctctatccagacgcaatatgtgcaggcgattgtcaatctgccatggaacgaatatagcaaggataatttcaatcttgcccatgcacagaaagtcttggatcgcgatcactacgggttggagaaggtgaaagagcgcatcattgaacatttggcggtgttgaaactgaaaggtgatatgaagtcacccattatctgtctgtatggacctccgggagttggtaagacttcgttgggaaaatcggttgcagaagctttgcaccgtaagtatgtccgagtttcgttgggcggtttgcatgatgaggcggagatacgtggccatcgtcgtacctacattggtgcgatgtccggacgtatcattcagaaccttcagaaggctggaacctcaaaccctgtgtttatccttgacgagatcgacaaggtaacgaatgatttcaagggcgatcccgcttctgcgttgcttgaggtgttggatccggagcagaacaatgcattccatgataattatctggatatagattatgatttgagcaaagttatgtttatcgcaactgccaataatctgaacacgatttcccagccgttgttggaccgtatggagttgatcgaggtgagtggttatatcatggaggagaaggtagaaatcgctgcccgtcatttagttccgaagcaattggagattcacggtttgtcgaaaggaaaagtgaagttcccgaaaaaaacgttgcaggcgatcatcgaatcctacacccgcgagagtggtgtgcgcgaattggataaaaagattgccaagatcatgcgtaagttggctcgcaagctggcgtccagcgaagaacttccggcacagatacgtcccgaagatttgcatgattacttgggtgcagtcgaatatacccgtgataaatatcagggaaataactatgcgggtgtcgtaaccggattggcttggacagctgttggcggtgaaatcctgtttgtggaatccagcttgagcaaaggaaagggctcaaagcttactttgacaggtaacttgggtgacgtgatgaaagagtctgccatgttggcactcgaatatattcattcgcatgccggactgttcgggatcgacgaaggtatgtttgaaaattggaatgtccatatccatgtgcctgagggggcgattccgaaagatggtccgagtgcgggtatcacgatggtcacttcattggtatcagcctttacgcagcgtaaggtgcgcagtaacttggctatgaccggcgagattacgttgcgtggtaaagttcttccggtaggtggtatcaaggaaaagatactggctgctaaacgtgccggaatcaaggaactgatcctctgccaagagaataagaaagatatcgaagagattaagcccgattatctgaaagggctggctttccactatgtggatgatatccgccaagtagtcgatttggccttgttgaaggaaaaggtggctaatccgttgttctgaaaatacatagggacattcattaaatattataaaatcagccaactgatttatacacaggatgttgtgagttgattggcttttttgtatctttaggtattcccctgaaaacaagatttgacggccaaaacgggggaaatatccaaactaagatatggcgaagatacaaaatatttcaggaattcactctactttgggttttccagaatttgatattctggaaaactatcgcaagagttttcatgagagtgagcttggcaggcttcattcgttgttttcgtttgattgtatggtaaaatccgcaggcttgtcggaccggcacctgggccgtaggaacatattcagcccttccgcaaagatcgcccttatggtcctgaaggcatacaccggattctccgacaggcagctggtggaatatctgaacgggaacatacactaccagatgttctgtggaatcatgataaacccatcgtttcccataatcaacttcaagatagtcagtgttatccgtaatgagatagcatcccgccttgacattgattccttccaggatatccaggcttcacactggaaaccttatctcgataacttttacgtctgcatgaccgatgccacatgctatgagagccacatgcgttttctaacggacatgaaactcctttgggaaagcatcgaatggctctacaggcatatatgccggcattgcagggatctctgagcataaggcgtccgtgcaacaaatacaggaatgtggcggaattctatctgtcctactgcaagaaaagaaagaggagagcttcaaggacaagaatgcttaagcgccgtatgatcaagcttcttgaaaagctcctcagttaaagggatgggatccatagcgagtacggtgctttactccgatatacacaggattaccagaagcgtctttccatcatcagaaaggagcttgtataggaaaagaaaatgtttgaagggcggaaagtcagtgaccgcatcgtcagcattgaccgtcattatgtacgtcccatcgtcagaggcaaggaaaccaagtctgtcgagttcggtgcgaaggtcaataatatacagatagacggcatatcgttcatcgaacatctctcgttcaaggcattcaatgagggtatacgcttgaaggaagcttcggcactcaaaagccacattactcgctcgcaagaataaaggccaggaataagaagacggaaatcctgtggattttcttcggaatacatacggcaaatgtcatactgatgattaacaagatcaggaacagaacggggaaagctgcatgatatgagtttactggaagaatcagaagaggtcatcagacttcttccggagcttcatgtcttgcccgataagaatatatgagaatatacaggaaaatgacaataataatggcatatgaagtgattatactctatcatcttcatatgccatgtattttgtgggaacatttaccgaatatccctaatgaatgtcctaaaagagaagtacaggactatctggtacatctcttttttgtatttgattcgactgtaattggttaagcttcctcttttttcgtttctttaacagaagcttcttctgttgccgatccttctggggtgaactctgtgaggcctgcgccgatcaggatgttataccaggagatcaatttcttgatatcactcggatatacacgttcacggtcgaaattgggaagaatctcggcgaaataagcacgtagttcgtctggtttggcggatgtggaaacagatgcttgttgtccgttttctttatttttgacgttggtcagaacttcatgcaatggaacttctgcttcatttgtgtagatagcgatatctcccagagaaattactttatcttttgcgtatgcaggaactcttttcttgtctgctaacgactcaacaatcagcatatttttcccgtgggaaaccaatttaaacaatcccggtttacccgagatagacaaaatcgtcttcaacataatactttgtttttctaatagtgtttaacttttgtgctgcaaatgtagtataactgtcgggaattttcggcagttttgaacatattttcttgtttctaatgattattcactaagcataaatgtctctatctactgaatatttttgtttttatgcttattatagaattgagagtcaatgttttttatctttagtcctgcaagaaaagctgttatttgcggaagtaaagcttgttctccgtcattgaagatcacgtagtccgatttctcttttttcatttcgtccggcaactggctttcgatgcgacgtataatttcttctcgggaaacggagtcgcgttcgagtatccgtccgatgcgtatttccatcggggcataaaccatcagcgtcgtatcgacaatccggttaaagcccgattcgaaaagaatggctgattcgatggcgcataccggggtattcagtctttcgacccaagcaaaaaaatgacggttcacttctgggtgaatgatcgcgttcacttgtccaagccgttccgggtttccgaaaatatgggaagcgagccgtcttttatccaaaccgtcggctgtataaagttctttgccgaacaaggtaatcagcttttcccggataacgggagaagtggctgttagatgcttgctttctgtatcggctatatacacaggaataccccatacttccaatagtgcggccaccattgatttgccgcttccgattcctccggtgattccaatcttaatcatttgactttgtttgttccaatataaattcgatccggtctggtgaaattgtagctacatccacccagctcagttttttgttcagttgtaaaggcaatgttcctgaagcgctttgttctaaatctgcaaaagagattcgtatttcgaaatcatctgccgagacgtccttgaagcgcgaaagagggacgttgcagctcactttcacgacagccgggaacatgcgcagggtgtaatggggcggcagattggtgcagataacaggtatttccagcgttttttctgtatactcttctatcgggatcgtaacggttacacttgtcggttcgagagtgactccgtctattttttccagttggacggtacgtgtgacggtcttgtttccttttttgatctcggtatagattgtttttatctctttcaaagtgtccagaacgacatcgctggcatagacgttgatgctgcggggagtaatggatatgtcacctgaaactttgaaacctgcatttgtttggacaactccctcgaatacggctggtatctccttcttgatgcgtttgctgtaagcagcatcgatatgttggggttcgaagctgagcagggatgtggtcgcaatcagatgtttctttatttcgttttcgatatctttccggttaatgatcagtttaccggatttttccgactgtgtcttcatgttggcctcaattggggcaaacgaacgtccgaaggagtagttcagcaatacactccccttgtctttcactttgactgtaatggcttcgggcggtgtttccgtgaaagatatatctggcggcacattcttgtacttgaccggaatcctgatatctatttcatactcctgttgcaggctttggagaagccagaagccgaaagccaacagtataaaacagaaaaagatcaaggcttctttccactgttgacggcgaagaaaagccttaatctctatccggacagacttgaatgtttgtttgatttgtccaagtcgtgacatatgttccgttgtttatttttgctgtgcgtccgctacagatgcaaacacggatgttttgtctacacggatgcgtacaccatcagaaatttcaatcaacatatatgtgtcaccgatttctttgatttttccgtagatacctccggcagtaatcactttgtctcctgcttttaaggcttcgcgggctttctgaatttctttttgtttcttttgttgcggacggatcataaagaaatagaagatcgcaacaataacaaccatcattaaaataccagaccattgctgacttccgccggcggcctgaagtaaaatagtaagtaagctcatataactataaacattaataagttaaaatcaattcgatactgacacaaatgtaaggataataattaatctttgagcaataacttttctttttttaactcgttgactacagaatctaaaataccgttgataaatgttccgcttttcggggtactgtagtatttggccgtatcaatatattcattcagcgttacgttgatgggaattgtcgggaacgtcatgatttctgccagtgcaacctgcatgatgataagatccatattggctatgcgttcggtttcccagttcttcatgtgtttgttgatacgttcacggaattcgcttcctttcatcaatgattggcggaataatttaatggcgaaagactggtcttcgagatctttaaacatcggcagcaatttttgtttgcttccggctgcttcttcgaattgtttgattgttttcagcgtaaaagtttcgacgatggagatgtcgtcgttccaataaatgcttttatcttgcagataatcgtcgatcgcttcattgccacaaattagttttttgaatacgatgcgccagaattccttatctgtctcgtatgaatcattttcgttattcagatattccccgtattgttcggacgacaagatcaggtcgagtaccattttgatgaaatcttcatcattatcccatgaaagcccctgttcggccacgtatttccgaagtgcttcattttcggctatttgtgcggcaaaacggttgtctatcagtcgggtattggggttcaattcggcttctgtcggcatatacttgttcttacgggcatccaagatacgtctttgtaagtttgtgacgtcgataattagaagaaggaaataatgatataagtcataagactttctaagactgaaaagcaattcgttttccgctactttgaggtcgttgtttccgttttgatagtaagaatatactatctgtaaaactttaatgcggattaaaattctgttgatcatcgtttgaaggaactacttgttataaatttggctgcaaagttagtcattcttttgataaaagttcgtcgcttcgcttaattttatgtgtgttatttattatttcataatattccgattctttatatgcattttcatgcgttaaaatagttgttgtttaaaaaaaaatgcacatatttgaggcaagttatgataaatgggtgggtgtttaacgaatgtttgctataatggaaaactcggtgaagaaaatacaggttgaaggtggtgacaaagagatcttatactctaaaaccattaaagcaggaaaaagaatttattatctggatgtaaagaagaatctgaaagacgatttatttctggctgtgacggagagtaaaaaagtgcagccgaagaatggtatgcaggtttcttttgagaaacataagatttttctgtacaaagaagactttgacaagttcatggatggaatgaatgatgtaatcagttacattaaacgatgtagagctgatgaaaggccggaggagacgatgtcggatgaaggtcggcaggaaagcgactcggatgagatcaaactgaatatcgaattttgacgaagtcggtagagaatgagaaaataataaggggctgttccgaaaggaaacagccccttatctttataggtcctgtaaaggaaacctatcgatgttgcggtttattctgccggatgaattgcttcagtaggacaagcatctgcgcaagttccacaatctgtacacatttcagggtcgatgctgtatttatcgccttctgaaattgctcctaccggacattcgtcaatacaagtaccgcaagcgatacaatcgtcactaattacgtaagccatttttttaaacgtttaaattgataactattagttcgtgcaaaaatagagttttctttgaattaaaaaaagaactcctccttttttttacaaataaatgctcttttgcaataagtcggactctttcccgttataaattcaaaattacgaaaagaattgagacgtctactatttattatatgtgtgttctttctgtctgtaactgccgtaatggcgcagaaagaaaaggtgaagaaccagccctatgcggatttgaaatggtttcatttgggatttcatgtaggtctgcatgcgcaggatttgatattgactaataccggtgtggcaacaaacggtgaaacctggtatgccgagattccgagctattcgcccggttttagtgtcggggtcatcggggatatgtacttgaatccatatttcaatctgcgttttacgccgactatccatttcggtgacaagaaatttgtgttccgccgtcctgaaatggaaggagtggagggtacagatgaaaatccggtggtaagcatgtattccacttctgtccgttccaactatctgacgtttccgctcgatgtgaagtatagcgcttttcgtgtgaataactatcgtccttatctgattggcggtatttatggtgctttcgatctggggcgtaaaaaaggaaatccgatcctgttgaaaggaacggatttcggtgtcgagtttggtatcggatgtgatatttatcttccgtttttcaaattatgtccggaacttaagtttagtttcggtctggtagacctgttggagaaagaccgaagtgatctgacagatccggaattgatcaagtatccgaattccttgtctaaagcaacttcccggatggtgacgctcacctttaatttcgaatgaatagttcgatatagatatagctggcgggaacagctagcataacgctgtcgaagcggtctagcattcctccgtggcctggtaatacattgccagagtcttttactccgagtgtacgtttcagcaaggattcgatcaagtctccccaggttccgaacaggacaaccgtggctgccagtcccaaccaattcatccggtttatttccggggcgaaccaggcgaatgcctgtgaggaagccaaggcgaggatcaatccgccaaaaaagccttcccatgatttcttgggagaaatccgttcaaataatttatgttttccgatcaaggagccgaccaagtatgctccggtatcgtccagccagacaaaaataaagatcgccatgataaagagcggcgtgtagctcatgacaccgggtgtccccggttctgcgccgatgaaattcaatatggagaaggagccggcacaataaacctgggcaaagagcgtaaatgcccaattattaatcgggttcggtgccttatagtagagttcagctatcattgtcaacatgataaatagtagatagggaaggaatatctttccgtctgtcaacccgtttgcataaacgaaggtggcgataaacagatatactcctccgagcacattcacggtccgttgcagattcgcattttcataatgtttgaccagacctccgaattcccaaagggtcaatcctgttataatacaaaaaagaataaggaaaaaaatcggatgaatataaatggcactgattagtaccacaacgaatataatgccggttaacgcccgtataatcaaatttttcaagacgatagtgtttttttattgatttattcaagtacaaatataattaaaataataattccatgcccatctgtttcaaatttagtgagcatggaattttttattgtttatgttatcttactgcttgtcagcttcggcaacttttgcttcttcggcctttttaccgtttgctttctcttgcagctccagaatctcctccgagcgggaaacccaagcacgcttgccgaagatctgttcgacatcttccgtgtagattacttcccgttccagcaatacctgagccagcatattgtggcctgacgcatattctttcagaatacttttagctcgttcgtactgttcattgataatggcctgtacttcctggtcgatcatccgagctgtttcctcgctgtacggtttagtgaaaccccagtcttgtccacttgaatcgtagtagttcaagttcggcaatcggttactcataccaaaatagacgaccatcgcataagcctgtttagtcacccgttcgaggtcattagatgctccggtagatatttttcccaagaaaagttcttcagccgcacggccgccgagcgtggcacacatttcgtccagcaattgttcacgggtggtaatctggcgttcttccggtaaataccaggcggcgcctaatgccttgcctcgcggaacgattgtaactttaactaacggattggcatgttctagcagccagctcaaggttgcgtgacctgcttcatggttggctatgcattgacgttcatccgcagttgttattttagttcgtttctccaaacctccgacgatacggtcgaccgcattcatgaagtcttctttttggacaaactttttaccgttacgagcggcaatcaaagcagcttcattgcagacattggcaatgtcggcaccggagaaaccgggagtctggcgtgccaagaattcggcatcgacgctttcgtcgattttgatcggacgcagatgcactccgaatatctctttacgctcgttcaagtcgggtaattccacgtgaatctggcggtcgaaacgtcccgcacgaagtagagccttatccaagatatcggcacggttcgtagctgccaggataataacaccactgttggaaccgaaaccgtccatttctgtaagtaactggttcaatgtgttttcacgttcgtcgttgctgttcatgtttacatttttaccacgggcacgaccgacggcatcgatctcgtcaatgaatacgatacaaggagctttctcttttgcctggcggaacaagtcacgtacgcgggatgctcccacaccgacaaacatttctacgaagtccgagcctgacagggagaagaacggaacatctgcttctcctgccacagccttagccaataatgttttaccggttcctggagggcctacgagtaaggctcctttaggtattttacctcctaattccgtatatttttcggggtttttcaagaaggaaacgatctcttccacctcctgttttgcttctgcaaggccggcgacatccttgaaggtcacttttcggtcgttatctttatcgaaaagctgtgcttttgcttttcccacactgaatactccgccgggaccaccgcttgcaccacctgacatgcgtcgcatcagaaagatccatacgacgataatcagcaggatcggaccgaacgaaacaagaaaattccagatcgcgtcgtcgccttcttcgaagctgacttgcgtagtgatatgattttcggcaacggatttgtcatagaagtctgaaaatttatcggccgacggtattttgacatacactttcgggtttgtacccaatgtcgcactgtcttttctgaacaccagacctttccgtccgtcttttacagttgcttcaaccagattctttttgttgtagacgaccatccggtcgaatacgttttcctgtgctaatttctggaactcggtccagcctaattctttagatgccgaagagtcgtttgtcagatacaaagcaaaaagcattatgaagatgagcccgtacatccaataaagattaaacttgaacatcttttgcttattattcttcggtgctttgttaaacatgtcgtttttattttccatatgtgattatctctatactatgtaagatcggtcatcagtcgaggtctacaatctgagtcactttggcatctgaccaaagattttccagattatagaactcgcgaagttccggtaaaaatatgtgtacaagaaccgtgccatagtccatcccgatccattcggcacgctgtgctccatctatcgaaagcggtttttctcctgccttgcggtgggcaaaatcccaagctgaatcagacaatgcggaaacctgggtaggtgtacttccttcgcagattatcatatattggcagatcgagccggataattgggttaagtctacggttacaatgtttttgccttttttttcctgtaggccttctacaatcgttttaactaatgcttctgtttgatccattattttttattgagtaatattcgaagtcgcaaatatacttcttatatttattatgtgggtgatttccctctattaatatatgtatatacttgcaaaatcaaaacaagcagaaaaagaaaaaagtttattaatgaaaaaaaattaccatatcgtttgtttattttgaaaaagtatgtacttttgcactcgctaacaacaagagagttgacaagcttaattgaaattgttcaatggtgtaatggtagcacaacagattctggtcctgttagtccaggttcgagccctggttgaacaacgaaataattaattgtcatctttgttgaacggaaattgttcaatggtgtaatggtagcacaacagattctggtcctgttagtccaggttcgagccctggttgaacaacaaaaagcctgtcattcttttgagtgacaggcttttttcatacatatattttacgttatcacggcgatcgttacgatcgccgtggtagttttatttatattttacccatttgatcatttctttgatgctcggtttctttccatacattaaaatacctacacggtaaattttggccgagaaccagatgataagtatagctgtggcaaacagcaaagcaaacgaaagagccaattcccataccggaatgtcgaacggcaagcggaccatcatcacgataggggaggtaaacgggatcatcgaacaccagaatgccagcgggccgtctggattattcatgctatagattccggcatacaagctgaacgccatcaaaagcataatcggagtcatgaactgctgagtgtcttcctgctgttccagagcgcttccgattgcagcaaatagagctgcatacagtaaatagccaccgataaaataaaggacaaaacaggtgccgatcataccgaagttgatcgaattgataatttcttgcacctggatgctgatatcggaagaaccggcagccacatcgtttatgccttgtgccgtcatctgtgctgtcatcatatcttcaggtgacgtgttgccaccgaaaaagaaaaggctccccgataccaagaccgttgtcaggattccccacaggaatacttgtgttaggccgacgaaaccgatgccaatgatttttcccatcatcaggtcgaatggcttaacggacgaaatcatcacttcgataatacggtttgtcttttcttccatcactccttgcatgaccattccaccgtacatgatgataaacatatagataatgaaagtcaatatcatgcctaagatagaggcaacctcggccgaagtgcttttttcacttccgtcttcatcccatttgatggttttgatattgaaattgattttgctgtcctcgatgatctgtttcaggttgtcgatgttgtaagaagcgagtttctcgtctttcaagtattcggacagtgttttgtcgatggtgtttttcagtcccatcggaatttgtttctgcgaatagagtgttgctgcggttgggttttgtaacaagtcgtctgttatattcaagaaagcgaaaatttctttatccgggtttttacgatattcttccaggctggaacctttttcggtgatgaaggtgtattcttctgtgtctttaaacagcggtgcgtatttgcctgtcgtatcgctgatcgccacctgtttgacatcatctcctttgatggtggataaccaaagcgggacgaacaccagcgcggcaaacaggaacggtgtcaggaatgtcagtaacagaaacgattttttgctgacacggcggaggtattctctttttattataagtcctatcttattcatgcttgcgtagtatttgtaccggagacggtgttaataaatatgtcgttcatcgaagggatctcttccgtgaaagaaatgatttcagtctgtcccgccaatgcagagaggagggcggagttggttatacccggctctttatggatgcgtacctcgcttgttccggccaggtctttttccgtcagcaggctgaacatttccgggatgggttgcaatttccctgatccggtatggaaacggagggtgaaattgtttgtccggaaacggcttttcacttctgtcacattgccggaaagcacaacttgagaacggttgatcaaggcgatattgtcacaaatctcttcaacagacgacatgttgtgcgtggaaaagatgattgtgtgtccggcatctttgagttcgaggatttcttttttcagcaattcggcattcactgggtcaaatccgctgaacggttcgtcgaagatcagaagtttcggttcgtgaatgatggtgatgatgaattgtattttctgctgcatccctttggacaactcttccagtttcttgttccaccagggcatgatatcaaatttttcgaaccagcgtatcaaccgtatgcgagcttcctggtaggagagccctttgagctgtgctaggtagatggcttgttcaccgactttcatttttttatacaggccgcgttcttccggcaggtaaccgatctggtagatatcttccggctgaaattcacgtccgttaaaacggacaaggccgctgtcgggggccgtgatgcggttgatgatacggatcagtgtggttttgccggctccgttcggccctaataagccgaagactttcccttcgggaacttggatgctgaccttgtcgagggcgaggtggttggcatattgttttaccacgtcttccgtttctaaaaaattcataggcattacatttttaatatgattctttctcccaattctttacttaatatattctttatttcgttcaggcgcgtgagctttttcatcagctcgaacacctgttccatatcttcgttgttttgtgtatttttgatctgtgcctgtatctctttgatttgagagagtacataggcatccttgaaagcatacaactcccggattaccaactggtcgagtttgtcttcttcctgttccaattcccgatatttggtgtgatacttgcttagctgatatttttcgctgatcaggttggcggcaaggcggctcacgttcgggtcgggatgggcgaggaaataccggttcgcgatgaacccttcggaccggcagcgatcggccgcttcatccatcatactcttgaagagcggagtataaaaggtcaggtcgtcgcgttccagctcggaacggatatattcggaaacgcggatcacgacatcctcgttcgtctcttcgtccgtatattggaacaggatacgttcgccgtaacgcacgatgtagcgcagcagggcgacttcgtatgcctcgtaaggcgaacgcttcggccctaccggaatgtttgccggcggcgtgaaaggcgctggcggcggcatgctgcctcctccgttatcgggactgtattcttccggtggggggggcgggatcgtattgtcaggaggcaggggactttcctgcggttgttccgccagcgtctcttccggatagggctggtaaccgggaatatccgggtattcggggatattgacgggagtagccggaatgggggaggacggagtgttcgcttgcctttcttccttgttgaggcggattttgttcacttcgttcaacaggagcatctcgtctatttccatcatcgtactgcattcccggatataaagggagcgggcgatattgtcggggatgatggccaccgtccggataatgtcggagatcagcgccgaccgtttgatcggatccgttcctgcatcgtccaatagcaggcgcgttttgaaacggatgaaatcggtctcgttctgccggataaactcggcaaactggctcgcgttgtgcttgcgggcaaaggagtcggggtcttctccgtccggaaggagcaccactttcacattcatgccgtcctccaacagcaggtcgataccacgcaaggcagctttgataccggctgcatcaccgtcatacaagaccgtgatattgctagtgaagcgatgtatcaggcggatctgtccttgtgtgagggctgtacccgatgaagcgaccacgttctcgacccctgcctgatgcatggaaataacatccgtgtagccttccaccaagaagcagcggtcagcctttacgatcgcctgtttggcgaaatagatcccgtaaagctcgttactcttatggtaaatctcactttcgggcgagttgacatatttggctgtcttttcgtctttcttcaggacacgtcctccgaaagcgacgacttttccactgagcgtatggaccggaaaaatgacacgcccgcgaaaacggtcgtttaccccgccgttgtcgtaggcgatcaccaaacctgtcttttcgagaaattcttttttgtaaccgctctttgttgcggctttatacagggcgtcccgttggtcgaggctgtagcctaactggaatttgcgaatggtatcttcccggaaaccacgttcggcaaagtagcgtaggccggcggctttgccttcctggtgttcgtagagctgggtcgtgaagtatttctgcgcccagctattgacgatcagcatgctttcgcggtcgctgcgcacctgcttttcgcgttccgacagttcccgttcctgtatttcgatgttgtactttttggcaaggaagcgaagcgcatcataataagaaagctgctcatgcttcataatgaagtgaacagccgtacccccttcgccgcaggcaaagcatttacagatattctttgctggcgacacatagaaagagggggacttgtcgctatggaaaggacacaaccctacatagtttatgcctcgtttccgaagggtaacgaattcggaaacaacgtccacaatgtttgcagcatccagtatccggtctatggtaggttgatcgatcataaatcttcttactttttatgtacaaaggtaagaagatttgtgatttttgaattatataatgacaacctgtttctctatttataattttgtctcgtcctgagataggttgactgtgtgttgaaaaatcctattataggttgtctataaaaacaaaaaacagacaaaccgtgttgatccatgtaatttgtttttacacgttccttgaagtcttaaagttagctttcttaacaccatgatgcgtatattctaagataaatacttacttttgcgtctgtatctgataacatgaaaaagaaatgaaacgaatactacatttgattttgatcagttgtttgtgcctctcggcggcagcacagaaaaacgctcctaaatggatgaacaaagccaagagagcggtctttacaattaccacttatggaaaggatggaaataagctcgcaactagtacgggattctttatttccgaaacaggcgaggctgtctctgcatacaatatctttaagggtgccgagaaagcaacaatcacagactttgagggaaaaacatttctggttaagaatatcctgggtgcagacgaactgtatgacgctgtaaagtttcaggttgaagtgccgaagaaagctgttttcctgccgattgctgctgagccggtggcaaacgggacgaatgcctatctgctattatactctaccggcaagaacgccacctttaagtctggtgctattaccgaagtaagtaagctgaaagatccgtataaatattacaagatggcagtcgcattggaagaaaacgaactcaatgctccgttgctgactcccgaaggtgaagtgttcgggctggcacaagcggatgcaggtggaaagaaagatatttgctatggtctttctgctggatatgcaggtagcttgtcaatagggtctgctgattatctgagttctgcataccgcaatatcaatataccgaaaggatggccgaaggaactggaccaagcaaccgtagctctttacttgatcagtggcacgcaggacgcaaaggcacgcttggaaacggtcaacgattttatcaccaccttcccggatgctcccgacggttatctgaaccgttctgatctttatgcctacaatcgtgcggaattggctaactctatggctgaacaggcaacctatttgcaaaaggcactggacgacataaaaaccgcttctaaatgtagcgataagaaaggtgatttctggtataatcaggctaagttgatctacggtgttgcttcggccgatagtacgctgactgatccagcttggacaatcgaagccgctatggaggctttggacaaggcgatcgaagaggataacctgccagcctatcaccaattaagagcggatatcctgttcaataaaggagagttccagcaggcattcgatgagtacatgatcgttaacaacagcgatgtcgcctctgcttcttcttattatttggctgcaaaggcaaaggaacgggttaccggttttaatatcggtgatgttatcgacctgctcgacaaggcgatcgagaaatgtgggacaaatatgaatgccgaggcggcagcttatgtgttggaacggatcaattggcgcctgcgccttgcacaatacacggaggctatcgctgattatgacctctattatacactgattggtggacaggtgcttccgaacttcttcttcctgcgcgaacaagccaagttccgtgcgggtgacttggagggagctttgaaggatatccaggctgctatacagggaagtcccagcacgcccgactactatgcggaagaagcttccatctatgttcgccagcagaagtatgaagatgcactgaaaagtatagagagggcaatcgcgattgctccagatttcggagcctgttatcgtttacggggcgtttgttacgtccgtttgaagaagaaaacagaggcttgcgaagcattcaacaaagctaaagaattgggcgatccgcttgctggaaagttgataaaggaacattgtaaataagtgagtgatatgaagaagctgatggatgtattgccgttgctgcttgtcgttgtcctgctgtttggtacggcttgtcagagcaataaaaagaaggatgcggagagcgtgaatgtaacgttgttcgataaggatctgccggagatcaagacgctggtcaacggagaatgggaactggtgagtggcaagaacgcccgtgagttctgcgaatatgagaatactttcatcaagtttgcagacgaccaatatgtctggacggaggacggcaaagccgaaccgggggctttgaactggcgcaaagcggatacgggggccggatatgaagcctatctgatggatgtcttctacgagaccaaccctgcctatcctgtgtctatcaaaggagacactcttatcctgcaagactgctcggaaacaggatataaatatactttggttaggaactagcttgcgtgaggctgtaaattaatttttcttgttcgtgattatgttctgtaaaaacctcaaacaaacttttctctttcagagattcgatcttttcttgatatgcctcacatagaagtttagcagtgatgataaaacctctacccaacaattccgcttctttctgatacagtttggcttttacggctttcaggtagttgttgagacttttggcttcctcatctttaccttttacttgttgtttggttttatcccaagatgtggcttttacctttttgccagtagaaaagccacatctttcaccatttacggtaatcaatacttcaataattgtagtaccgtcttttctaactctgttttctcttataaaaaagagagtggaaaatgaacttctaaccatttgtttaatctttaaattagacatttagaagtcctttgaataatctgtataatgctatgtgttagattgttatgttaaaatttgcagccattttgggaaaaatggaaaatggctgtgatttggctgcaaaatatcttcaattttactcgtttcagaaaggaaaaacggtgaatctttcctatgggaaaaagaaggtgatagaagaaattttgagtatttcttataaccagtttaaagaagtatttgattgggcaagaaagaagaagcatataagatatttcaataaacaaaaaaactcccgtaaccataacgattacaggagtttatatatttagaaataacttaaattacttcttcatagcttcctcaatagcaacagctacagcaaccgtagcacctaccatcgggttgttacccatacccaggaatcccatcatctcaacgtgagcaggtacggatgaagaaccagcgaactgagcgtcaccgtgcatacggcccattgtgtcggtcatactatgggtaacttgctataaactcctttaagaaacattgtcttgtctgtaaagtgctattttacagtaatatacaaatgtattaaagaacttcgttttattattgtttttgttttattctaaaatggctgtgaataagccacgaaattattgcgtcttgcttatatttctgttacttctcctgtctccacatcaacagtaaaaataacttgtttcttacttccgtcataattggtaatatcaatctggtatttccatattggattactttgttctaagattgttgaattgatgcgggcattatcttcaacaccttttaaagaagggatagaggtcttccaaacatcttttcccgtttgataattatatctgataataaagtaatcactttcacggtcaataaaaatttcttctgtataagagattggaacaggattgaagtctccatttacaaaattccccttccattctgcaatcttttttccatcaggtgataatatgatagaataagtacaattctcaatcatatttaatacaaaaatacttccttgaaaccaataaggatttgcaatagctggataattaagaggatagacaattatttcattaccatttaaaaggaaaatatctttggaaactatatcacttgatgttaaaagggtattttctctatgaagatatgaaagtgcagcagtaaatccccaattcgttttgtaaatatctgatctaaaatcaaatgcagtaacattaaaaagctctgtttcgccataacctttatcaatttttattgtacgttcgactgtttttgttccgttccattctttcaattgctcctttgtatgattatcaaacataccgatccacattttttcatttttaatacctgtcaagaatgctgtatcttcattataagcacatggagtaatgcttaacatatcaaagccttctcgattttttactttgtaatcgtaaaaattatttcttctctcctgttcccattcttcactacccatcaacggatccttatcacaactggataacagtaacaaagaacagataacaaacatacatacattaaaaactctattcatcttgattcttgttgttttttcctgtcccctctggaaagattaataaataaaaaaggtgtgggaactgtatttgctttatcctacattcaggtcttcgcattacctattccgtggataaagcaacagcaacccacaccagttttgtatataatttatcctcacagataagtatatatcaaatgatgcgagtgctattgctatcatcttcacggaataatcaaagttgcgaagtttgaatgtagaagataatatcaataacacctttcgttaaacgtatgtccttctatagaggttcaacgccatgaacttgtagaattgccacaaagttacgaaaagtgttttatgtgtcaatgatttaagttgaaatattaaccatttaaaaggaaagactgtcataagtctgcaatatttcttcctgtctcaatcccaaatacctttttgtgatcgccacactggaatgattaaacaactccatcaacttgactaaagccagttctgcgttttctgcattttggttgtacacctgcctgccaaatgtttttcgtaggctatgacaactaaaatgttgaactttcagtttgtatttggctttgatctcttttaagatcacattgattctttgtactgagtatgttgtccccttctggcttaccagtataggcgaattaatccctattggctgaatgtgatcgtagcattctgcaatatgtcttttcagttgaggattaatcctgattgtacggtttttctttgttttcttttcctgcaaggtaaactcatccacattcagaatatctttccaacgtaatgacaatatatcagagatacgcaatccccagaaacaacctatcgcaatcagcaaggacattttataatctccgtccctgcttaatcttctgaccagatttgacatttcatcccatctcagataatccgctgttgttgtgctgtatttcaaactcataatattcagttttaattgattacaaataaaagtgattgttttttgtgtcctctcttcttctttgaatggtaacttattgaaaatcaaaagaacattcactttcaacagaagtgaacattcttttttgattctcattgttcctttatcgccttatacaagaaggtaaaaagaaggataaacggaatgatcggatagattaacaacactatcaggtacacaatggcggcaattaagatataaagtattatttccatatctcacaatcttaaatccgtccgttttcagaataactgtaataagtctcatccgttatgataagatgatccaaaaggttgataccgatcaatttggcaatctcctttactctttttgtcacttgatcgtcttgcatacttggttgtatgttcccagacggatgattgtgtgccaatatgatggcagaagcattacccaatattacagcctgcataataatgcgtatatccgcagacgtttcattcaatccaccttctgaaatatggcaaacgcctaataccttgttggctctattcattaaaatgactttgaaaaactctttgtactgtattgtttcagaatcaaatacagataaaaggattttataagcattttcagcggataagattttctctctttcagaggctttaatctttgacttgtaagtgagtttcacttcacataccttgtactgactttccataatgatataaatttgatttttgttgataattcctgtgtatcgtcttggttttaatccttcgtagtgttgagggttacaccatataaaagagaagaggagtaaataccgcagtctgttgttgaatctctgtccgttaaaaatctctttcccttgtttccaaagttcgataggcatttatccgttttcgaaaaagagattcataggtggatcgcttgcatatttttcacttctctatcacctactgaggggggactttaagataagtgcggttaagctctcgtttcatacatgagaatttgatccatagtgctttttcagagttgaggtatgctttatctctgtaatttggtttgaaggaaattattttgatataaaggttcataaataaaaaatccttcgaagcaagtctccgaaggattctgattcatagtagaagtatgtttttctgagatcacgcaacattttttgaacagggtctataaaatcattattctctcaaaaatgttgcactgtcatatctttgattcaactaataaaaatttacgacttccacctgtgttaatctccttcacatagaaaaactcttttatggattgtcctgtgatcgtcttttggggagttactccggtaagtgcataaatacgggttaattcctctttgatgtatttcttcgtatatttttgtcccactttgaaggagttctttatcaactggataaattccgtgccttctgttttttccctgttttgcttcaaaatcatagcctctttgattcgctttacggaataatccagcgattcgatcatctcctttccaatctcttcgtatgcttcataaataaacgaatcagcctttctcaaatcttctttgtagttacggatcatctcggtttcatcatcacctttcaacaattccaattggcggacaacttctttgcgcttatctttcaaagacgcatatttactttcttttttcaatctctcgaaatcaccaaaagggaaataggcagattccacgtccaaatcaaataatcggttgctcctgtagcttgcaatcagtttttcttgcgcattgtaacttgatttgagtagggcttcatccacatagttgtcaatagcaaagaaattttcttttccatctttattcagcatttgattgaatggcagtactttcaaaattccatgataggcatttcttgcttcttcggaagttgcacagtcgtaaaatgtctttattttatcatagacttccttattcgcttgcaagtatataccaatttcttcttctgtgcggactggtaaatttggatttgtgttaaagatgtgacacacacggtttaccccattacggaatcttccgattgcctgtattgcatccgtatgcggatcgatcatagagtattcagagaaatatacgtctgaaatcataatgactgtaggctttatttccagctcaatatccagtgcattgtagaaacgactggtaaagaagttgtatttcttcattttggatttgctccattgttcgaatgcgtgtttgaatttcttatttttcagtttttccacactcttctttgcgcagaatacggtagattcattttcaatatccagttgcttgataaaggaatagatcatatccgtagagtttacaaaaagacaaatgtcagttgcattcagtttgtcgagtgtccttttcaactgctccaatacgttgtttgtatggattaatgaaacaggaagtttatattcaaatgcaggttcgatcctgataatttggaatttctgcatttcgaatcgtggatcactgaaagaaatgggagtcgcagataccaaagccttttcattgaacaagaagaaatcatcgaacggaagggttatatccgatctgtaatctgcatctttcacgatcttatggcattcatcgaacaaaagaaagcatgtaccatatatatccatgtccattaattcaaaagcgtctttcactttttgaaaactttcgggagtagtcaggatttttgttctcttatctgctgatttttccagatacttaatgacatcttccgtatagacaccttcataaactccaaacaggttatcctctttatgtttgggatcattgcatttgccaacgataacaggaacattcggttcgataatgatggaattacggtctgtttttaattctccgtaagtggctcccaaacctgtaagtgtcttatataagatggtattggttggaatcattggaagtacttctgtcagatattggattttaccgttttcgtttttattgatttgaattatttgagtagtcattgttttttctgttttaaatggttcgtaaatgagagaggaagcggaaaagacttcctctcattgtttttcttttatcagatcaattctttttcagtcaggtattccatcaagtcatccgttcttttcaatcgaaatatgatctttccttttttataagaggcataagcggtgatatatccgttagtctcacggaataaaggaacgaattgcagaactttaccgctttcgaccaactgcttgaacattgcgagttgcaaatcattgtcattattatctttgtaggcttccacatttttcggttcagttccgaaatcttccgttttgccctctttcagataccccatcagccaagtaagttctttttgattcaagattaatttgaagcctgccatgcttcgggattccaaccaagcataaggaaaattgtctttacctgtcttgaactggatggtcaggttttcgtacttattcatcatcagtttagctgcattgtgtgcacccatgttgtcatactctcttactgttttgttctcgaagttgatatttaaaatttccatctctttttatttttgttcttccctctttcctgttcgggagttcaggtaatcagcgaatcgagatgtgcacctctcgttgttgattacactgcaaaggtgcgggtattttgtagggtggggtaggaacaaaaaaaggggacaaatttgttccccttagtcagtatgtgaaagttccgtttggcagttggtagtctttgtatctctttatcagcgttttcaagtagtcaggatcggttgatatgctttcattttggataattccagtgaagaaaattaaatcgccaatcagttgcttttctctcttagatggtgaatcttttatcttccgtttggaaatgatggactgataagagttgaagaaagtgataaaatgaaggtagaaggcataagccaatacggaagtggactcagaggtttcagacttcatataggattttatgttttgccagttccaatcgtcagaggtgtcaatatcttctttaagccttgaacatatacgaagtatggtaggacaatcctcaatggtatatttcttctttccaatgcagaatgtgatctttgtctcttctttgaaagtgggagattgcaacgggtgaagttctgtattttccgttattttgtcaatgatggtttgtaaggctgtcaatgaggatatatgtttgatcccatccgtgcattgattataagagaaatcatatacgaataataataaatgccagaatttctcaatgtccatttcaaagaaagttagtgtctctccaaattcttcacgggataaaaattcattcagtcttgctttcaatttatccagcttcttcaatccgcttttggttgcagaagtattgtaacgtgagatataccgctccaataatggcgatccgtagaaatcctcaaaaggttcgattaatgtagccaaatgaaagacatactccaatgcaggaagttgatcgtcatggggtaatttgtctggaagtgtaaacatgagattcttcttttaaatggtgattgtgcaaagttaggaataaaaagtgaaatatggaaaggcaaggtaaagttattgatagataggtgtttcaagaaatagtttcaacggattcaaaggttgtaaaagtcatgtcttggtcacgttcagactttgttacgttacctattcgtaaccgtgctgaaagtgggacatccgatagctttcggaatacaaaagtaactatatcatagtaagttaccaacgttttaggcgaaaataatttgcttctgacgaagattgcgttgttcctctccgttttgcgtatcaacaaaggactcttcaccaactaattttgaaccaaaaaatatttaggacgatgaagagtacattttcagttatctactacctcaaacgtcaggtagtgaagaaggacgggacagttcccgtcatgggacgcatcacggtggacggcagccagacacagttcagctgcaagctgacagtcgatccgaaatcatgggacaccaaaagcggacgtgtcacggggcggagcacggcggcacttgagacgaaccgcctgctcgacaagatgcgggtacgtataaacaagcattatcaggaaatcatggagcgtgacaatttcgtcacagcggaaaaggtcaagaacgcctttctcgggctggaacaccgctgccacacgctgatgcaggtgttccaccggcataacgaggactatgaaaaacaggtggaagcaggtatgaaggcaaaaggcacgcttctgaagtacaggaccgtctacaagcatctgcaagagtttctcactatccgctaccatgtgaaagacattgctttgaaagaacttacacctgccttcattaccgagttcgagatgttcctgcgcacggataagcactgctgcaccaatactgtctggctgtatgtttgcccacttcggacgatggtgttcatcgccatcaacaacgagtggctcatgcgcgatccgttccgtgaatacgagatcaagaaggaggaaacggtacgcagcttcctgacaaaagacgagatccgcctgctgatggaggggaagctgaaaaacgccaagcaggaactgtaccgtgacctatacctgttctgcacgttcacggggttgtcgttcagtgatatgcgcaacctgacggaagaaaacatccgtacctacttcgacgaacacgaatggataaacatcaaccgccagaagacgggtgtggtctccaatattcgcctgcttgacattgcaaagcggatcattgacaaatacaggggattgtgcgaggacggcaggatatttcccgttccctgctacatgacctgcctgtacggaatccgttccgtcgccaaacgttgcggcatcaccaagcatatcacctggcaccaaagccggcatacggcagcaacgacggttttcctttccaacggcgtgcccatcgagacggtcagttcgatgttggggcataagagcataaagacgacgcagatttatgcgaagataaccaaggaaaagctcaaccgggacatggaaaatcttgccataaaacttagcggcatcgaggaatttacaagcaatagcatctaaaaaaggaagccatgacacgaggaatcataaaaatagaggaaaatatggtcgttgtaaccggtaacgaggtatggatgaccgcagttgaaatcgccgggctgttccatgcaaccgttccggaagtgaacgccgccatcaaagccgtacgcaagccggatgtcttgaatgattatgaggtctgcggttacatgcaacttgaaaatgggctatacgcggatgtctattcgtttgaaatcatcatccccgtctctttccgtctgaatacctatcccagccatgtgttccgcaggtggctggcagacaaggtcctatcgaatgaaaagcggcaggcatatgtgatgttcatacaaaatgagaaaatcggatattgctgattgtacatcaacgcgagattaatttgtaatattttttacaaatcaaccttgcgttattgatactgaaaaacatgaaaaggtcagtccgaaaatattacgactctgacctttttataatttatatcaaaatggtatatctgttaagttctgaaagtctcgtccgtttctgaggattgaaattatttttccattcctttcctttattaatatattacgagaagttatttttattaattctccaagttctatatgttcgttgtttctatccatatataaaacatctccaatatcaaccgtctcgccattggggagacaaatagaagaatccgtagtattatttgatataagttcaaactttttccgtaactcatctattgcatttaatatcatacttgaatcttgtgataaagtaactttctcagggaggatggcaggtttttcaacggataataactgcagcaatgaattgacttctttatcatcagcatcaaatgtttcagttatacatttagctatttcagggatggttttctttactccatcaattcttagattttcattgtaagataaagttctgataccagatatatcaaaaggcatagccgtttttatatctttaataagaacagtctttttattaaaagcctgcctaaagcctaactcataaaatacgtttggatttctcgaactcaagtcacatatagccatatcacattcaagtatcttttgtagaatgtcgaccattatcatgttagcttttgatgtgtcatctgcacggacaggttcaaatcccgcttgttcacatgctggttttatcaagtgttcatatactctattgaaatgccctttatcgtatccttctgtatcacttataggcataataacaaaacacattttcttttcttgttccatagctgtgaatgattatatttattggcaaatataactattttagaaaatagagccaatatatatagtcttttcattcataaagacttactattacgttatatattcattttgattcgggtgattttcgggataaaaacatacaggtaattagccaatataatatcaccttactttttatataaatcataaccatatctaaagtgagaaacagatcctatcgtcatgtcaacaatctgtgcatagatagagaaactgtttatctatcaaatgaaagggaatatgcttttcattcattaacaaatgttgcaatattgacttaaagcacttctacctttaaaacttttcttcatctctacagaatgctgttctctatcatattttatatattcacaaagttgctccgactctgctttagtaaaatgtacgacagataacacaaaatatggctggttgcgattaaggatatttgaaccggttttacctgctttatctatgaaaatggtaggatttgtattcatataaagagaaaacggctacacctttgtgaggttgccgtttcccttcttcatttaacaacctaacttcagcggctttcggtagttcgcctccaagacctcacgcaatcccgattcgggataaagcgtctttccgcccaagaagacaaagggcagcaccctgttgttacggtattcctgtaaggtgcggcggctcacgcgtagcagctccgccacctcgcagtccttcaggtagcgctccccgtccagcggcgggcggtaactttccaaaaattcggaaagccatttggactgttgcttcatcttttgaagcaggacggcaacggattcgtcgtccgtcgtgatgacacggttttcctcttccatgactattgctgtttttgatgattaccggtccgcttgcctgccgtgcaaatcgtgccgacaagcgggatgagccgtttcacgtcctccggcttgtaataatacttgtatccgatctgcgaatagccgataaagcccctgtcacgtagtttctgcaacgtgcgggggctgatccttagctgtccgcagacctcctctcccgtaagccatttgccaaggcgcctgccgtcacccttgcggtgcaaggcggcgatcttctccacgagggcgtccatctgtgacatcatgccctcaagcgtcattttctcaaccgatattatttccatgttcataacaattagggatttgccgcaaaggtaacgttcccgggcggattccggaccgtttttcggtgaacggcagcttgttgcgccaattgtccgggttacggagacatttcgacaaaaattttacgtgagtcacgcgtgagttgttaaaaccgcctttccccattgccgaactttgccgcggaaacaataaaaagcgactgcgtatgaaagtgataacgattgaaagtaccgcctatcaggccatgatggaacagatagcggaaatagccggacatgtccgcgagttaaggaaagaaagggaacggcggcaggaggcggagacgaaagaccggctgctcgacagtgcccaagccgccgggttactgagcgtgagcctccgtaccctgcaacgcatgagggaagaccaccgcatcgagtacatcatggtgcgcggcagttgccgctaccgcctttccgaagtgcggaggctgctggaggacggtacggtcaagggcaaggaagaaaccattgacgacctgttccgcaactttgcggtgcgtacgggcggcaacaagcacaccaaaggaaggaggacgtgaaacatggaactgcttacccggaacaatttcgagggctggatacggaaggtcctcgaccgtctcgaccgccaggacgagctgctgctggcgatgcagacgcaggagcggcaatccttcccgtcggggaatatccgccttttcgacaaccaggacctgtgcatgctgctccagatcagcaagcgcaccctccagcgttaccgcagcatcggcgtgttgccctacaagacgctcggcaaaaagacctattacagcgaggaggacgtgctgcaattcctctccgcgcatgtaaaggagttccgcaaggaagatatggccttctacaaggcccgtatccataatttctttcataaataaccattaaaacatttattcagatggcaaagaaaaaagacgaaagggacgtgctggtcgtccgtgacgagaagacaggcgaaatcagcgtggtagccggactgaacgcggacggctctcccaagcgtgtccccgcaaaaacggagaacgcgcgtgacttcctgcaattcgaccggcatggcgacgtgctggacaacttcttcaagaacttcttccgccagtgcaaggaaccgagccgcttcggcttctaccggatcgtggcggagcaggccgacaaggtgctggacgtgatgaaggaacttctgaaagacccggaagccaacaaggaactgctcgcgccccacaaggtggacacttccggctacgggcaggaagcgcaggaagagcaaaaacaggatgaaccccaaaaacaagaagaaatggaacaagtacaagaacaggaaagcccccggaaggcacagggctaccagcccatcgacgaaagtaaaatcaactggcaggagatagaggagaaatggggcgtaaggcgtgacgaccttgaaaagtcgggcgacctccaaaagatgctcaactacggcaagtccgaccttgtgaaggtcacgcccaaccttggcggtgaggcattcgccctggaagcccgcctctctttcaggaaggacggcgagggcaacatcggccttgtgccgcacttcatccgcaaggagcagaaacttgacgagtacaaggggcacaagttctccgacgaggacaggaagaacctccgtgaaacgggcaacatgggcagggtcgtggaccttacggacatggagacgggtgaaatcacctcctcattcatcagcatcgaccgcaagacgaacgagatcacggacatcccggcgagccgggtacgtataccggaacgcatcggaaagacggaaatcaccaggcaggaacaggacatgctccgtgccggccttcccgtgcacggcaaggtcatcgagcggaacgacggcaggaaattcgtcgccaccctgcaagtgaacgtcgagcagcgcggtgtggagttcgtgccgggaaccggcaggtcggcacgtaccgcacaggcgcaggaaaaccgtgagaagccggcacaggcacagggcgcggagaatcccgcatccgtacagaaaggacaacgccgcaacacgtggacgaacgaggacggcagcatccgccccatcaccaaatggagcgacgttagtttcaccgagcagcagaaagccgactacgtggcgggcaggaccgtgaaattggagaacgtgacagacaagcagggcttccatgccacgatgtacatcaagttcaacccggagaagggacgcccgtaccgctacgagacgaatccggacaacgcgcagaagatagccccgtccaacgagagccgcacgcaggtggcggtaaacagcgaaggtaggacgaacgaagcgaccaagtacctgaaagagcctttgcagaaaggacaggtcgccccgaaggatgccgcacagcaggataaatcgaaaaagagaaaatggggcatagggatataaccccgtgtccgccactgaatccgaagtaacatctattataaaataaaacagaaaaacatgaagaccatcatcgcagaaaagccctccgtggcacgtgaaatcgcccgcatcgtgggcgctacaaagagagaggaaggatatttcgagggaggcggctacgccgtcacatgggcattcgggcacctcgtgcagcttgccatgcccgacggctacggcatacgtggcttcgtccgtgacaacctgcccgtcattcccgtgacattctcgctcatcccccgacaggtaagggcggaaaaaggctacaagacagacagcggcgcggcggcgcagataaaggtcatcgagcgccttttcagggaaagcggacagatcatcgtggcgaccgacgcgggccgcgagggcgagcttatcttccgctacctctaccactacacgggatgcaccactcccttcgtgcgcctttggatcagctcgcttaccgacaaggccatccgcgaggggctttccaacctcgaagagggaggcaggtacgacaacctctaccttgccgccaaggcgcggagcgaatccgactggctcgtgggcatcaacggcacgcaggcgctctccgtcgccgccggacacggcacctattccgtcggacgggtacagacacccacgttggccatggtgtgcgaacgttaccgggagaacaagcgtttcacacccgagaccttccggctgatccatatcgcggtggacggtcgtgacgggaaggcggtcaagctcacctcttccgaaaaatggaaggagaaagaggaagtgacgggactgtacgacaaggtaaagaaggccgggagtgccaccgtcacgaaagtcctgtacaaggagaagacggaggaggcgccgctgctttacgacctgaccacgctccagaaggaagccaacaccaaacacggcttcacggccgagcagacgcttgaaattgtacagaaactctatgagaaaaggctggtcacttatccgaggaccggaagccggcacatccccgaagacgtgttcgcggaaatacccgggctgctctccttcatcggctccatgccggaatggaaagacaaggtgcaacccgaagccgaaccttgccgccgcagcgtggacggcggcaaggtgaccgaccaccacgccctgctccttacgggcgagaagccgttgttcctttccaaagaggacggtaccgtttaccacatgatcgccgggcgcatgatcgaggcgttctccgggcaatgcgtcaaggataccaccaccgtcacggcggagtgtgccggagtggagttcacggtgaaaggctgtgttacaagagaatacggatggcgtgcagtctatggggacgaggacaaggacgagcctgccctccctgcctggcgggaaggcgacacgctgccgctgaaagcggtctccacgacggagggcaagaccaagcccaaaccgctgcataccgaagccaccctactcgcggcgatggaaacggcgggcaaggatatcgaagatgacgagctgcggctggcattgaaggactgcggcatcggcacgcccgccacccgtgcctccgtcatcgagacgctcttcaggcggggatacatggaacggcgcaagaaatcgctcgttcccaccgagaaagggcttgccctctattccgtagtgaaaggcatgcgcattgcggatgtcgtcctgacgggcgaatgggagaaggagctggcacgtatcgagcgcggcgaactctccgccgacaccttccgtaaagacatcgaggagtacacgcgggagatcacctccgaactgctctcgtgcgacaagctctccttccgcaaggactccggctgcacatgccccaaatgccgaacgggcaggatgctgtttgccggcaaggtcgtgcgttgtgacaatgcggagtgcgggctgcccgtgttccgccagaaagccggccgttccctttccgacgatgaaatcagggaactgctcacaggcgggcagacgaaactgctcaagggtttcaagagcaagcagggcaagagcttcgatgcgatagtcgcattcgatgcggactgcaacacaacgtttgtgttccccgaaaagaaaagcggggctgccactcagaggggaaaaaaataatagttacctttgccaccggttcagagccatggactgttcttcgatactgaattacgcccacgttttggatttagtggcggcacccggagggataccgggtgccttttctttcccttccaagagattgtcccgatcataatcaatccactaaattcaaagcaatgaacagcaagaagaaagacaagggacggaccgatttttcctactatggtctgtacctgctgaaccatctcgaagagaataggcttgaacaggcttccgatgacgcattcatccggagacgctccgaggaagccgccgaagcgtatgagcgtgcgcggctcgaaggctatcctcccgaaggggcgcaggaactggcgatggccacgctcctgcaaggactccgccattcgaggtacgccatccttggcgaagtcatagagaacgagtttaccggtgaagtgccggaatcaaagcgtgaagcgtttatccgaaggctgctgccgctgctcggtgcggtcttctccgcctatgacctttcggacgacgatttcgccctgtcgcccgaatacggcctgctctatacggagctgacgggagcggttgtcctttatatcgaggagcatggcgtttaaccgcaaacagaaattgcgggacaacatcgaggcgatacgtacggcattcacccttgagtgggaacggcgcacacccaccgcacgcgagcggctcctgctggagcggtattgcggattcggcggcttgaagtgcatactgaaccccgcaaaggaactgacggatgccgtccactgggcgaaatcggacctcgaactgtttgccccgacggtggaactgcacaggctggtgcgggagaacagccgtgacgaaacggagtacaagcggtacatggacgccatgaagcagtccgtgctgaccgccttctacacccctccggagataaccgacgcgattgccgacgtgctgcacgggcacggcatacgtcccgaccgcgtgctggagccgtcggcgggggtgggcgcattcgtggacgccgtgttgggctacaagccggatgccgatgtgatggcgtttgagaaagacctgatgaccggcaggattctgaaacacctgtatcccgaccaaaaggtgcgggtacagggattcgagaagatagagaagcctttcacgggctatttcgaccttgccatctcgaacatcccgttcggcgacgtggctgtgttcgatccggagtttacgggcagtcatgatcctgcaaggcgttccgccgcgaagacgatacataactatttcttcctgaaaagccttgacgcggtgcgtgaaggcggcatcgtggcgttcatcacctcgcagggagtactggacgcaccgtccaacgtacctgtacgcgagtacatgatgcgtcatgccaacctggtgggcgtagcacgcttgcctggcaacctcttcacggagaacgcgggtacggaagtgggcagcgacctgattatcctgcaaaagaacagtggcaaggaaggcgaactgtactacaatgaaaagctgttcgtgcggaccgaacagacccccatcggaacttccgtaaacgggtatgtatggagtatcggctcgttatccaacacggacttgatcaagggcacggacccttacgggaaaccagcctataagcacgtgcacaggggcggcatcgggcagatggcggaggacttgcgggaacatctgaagattgaactgcaccaactggacaagggactgtatgaaaggcacagcctgcatccgggacaaggggaaagcacggtggcggaatctgtttccacgccggttgccacgtccgatatgcaaccgcattcggaaaagacggtagagcccgatacggaaataccgcagccaatagacgagaagccggaaatagcgccgcgccgtccggtttattcggaaggcgtgcagctctccctgctcgacctctggggcatgaccgtggaaaccggcaagccgggaaccgccgccaagaagaaaaagactgtgaagaaaggaagcccggctgggcacatgcaggctaaaccgcaggcaaaggtcgcaccggaggttacgtccgctccgccacaagtgtccgtcacgttcgagccggagagcaaggaaaaccatgaggcaaagccggacgatgctgcaaggcaaagcgatccgaatgacaggcatgcggccatcgactgggaagagaacccgcccgtcaacggattctacgagacgatgatgaacctcacgccggagagacgcaaggaacttcgggagctggcggcacgccaccgggaaaaacggccggacgtggcggacgtgaaagccgcaccggaagaaaagcccgaggaggaagccatggacctgtctccatctccctaccacctcacgccggagatgcacctgcgtgaggggtcgctggtggcaagcaggacacgtgacatcggttatttgaaggacataactccctacggcgcgacattccaaccgctcgggctgagcggttaccggaaagagaaagcgttgctgtacgtgtcgctccgtgacgcatacgagcggctgtaccgctatgagtcgaacaggcatgaggaaaaccccgcatggcgtgagcacctgaacacctgctatgacgagtttgtcatgcgctatggcaacctcaacgccgcccagaacgtgaaactggtaatgatggatgccggcggacgtgacatcctctcgctggaacgggaggagaacgggcggttcgtcaaagcggacatcttcgaccgtcccgtttccttctccatgaatggacacgctgaagtgaacactcccgaagaggcgctctccgcctcgctcaacaagttcggaacggtcaatctcggttatatgcgggagataaccgacagtacggaggagggattgctcgaagccctcaaaggacgcatcttctacaacccgcttacggatggctacgagatcaaggacaagttcatcgccgggaacgtgatagagaaggcggaacgcattgaggcatggatgggcggcaatcccgcaaacgggcggctgccggaggtgaaacaggcgttggatgccctgaaggaggccgagccgcagcgcatcgacttcgaggacctcgatttcaacttcggggaacgctggattcccacgggtgtgtatgccgcctacatgagccgcctgttcggcacggacgtgaaaatcgcctattccacaagcatggacgagttctcggtggcatgcggctaccgtaccatgaagatcacggacgagtttctggtaaagggccattaccggaactatgacgggatgcaccttttgaaacacgccctgcacaacacctgccccgacatgatgaaacccgccggcaaggacgagcacgggaacgagatcaaggtgcgcgacagcgagggtatacagctcgccaacgccaagatagacgagatacggggcggcttttccgagtggctgaaagagcagtcgccgcagttcaaggaaaggctggcggcgatgtataaccgcaagttcaactgtttcgtgcgtccgaagtatgacggctcgcaccagaccttccccggccttgacctcaaagggctggcaagccggggcgtgaaggacatatacccgtcacagaaggattgcgtgtggatgctgaagctcaatggcggtgggatatgcgaccattcggtcgggacgggaaagacgctgatcatgtgcatcgcggcgcatgagatgaagcgtctgaacctggcgcacaagccgatgattatcgggctgaaggcgaacgtggcggagattgccgccacctatcaggcggcctatccggacgcacggatcctctatgcgtcggagaaggacttctcgagcgccaaccgcgtgcgtttcttcaacaatataaagaacaacgactacgattgcgtcatcatgtcgcacgaccagttcggcaagattccgcagtcaccggagttgcagcagcgcatcctgcaggcggagcttgacacggtggaggaaaacctcgatgtgctcaggcagcagggacggaatgtctcgcgcggcatgctgaaagggctggaaaagcgcaagcacaaccttctggcgaaactggagaaggtggaatacgccatcaagtcgcgcacggacgacgtggtggacttcaagcagatgggcatcgaccatatcttcatcgacgagagccatcaattcaagaacctgactttcaacacccgccatgaccgtgtggcggggcttggcaattcggagggaagccagaaagccctgaacatgctctttgccatacgcaccatacaggaacgcacgggcaaggacctgggggcgacgttcctctcgggcacgaccatcagtaactcgttgacggaactgtacctgctcttcaaatatctgcgcccgaaggagctggaacggcagaacatccgctgctttgacgcgtgggcggccatcttcgccaagaagacgaccgacttcgagttcaacgtgacgaacaacatcgtgcagaaggagcgtttccgttatttcatcaaagtgccggaacttgccgccttctacaatgagattactgactaccgcacggcggaggacgtgggcgtggaccgtccgaagaagactgagattctgcaccacataccgcccacgccggagcaggaggagttcatcgaaaagctgatgctgttcgccaagacgggtgatgccacgctactcggcaggccacccctttcggaaacggaggagaaggcgaagatgctcatcgccaccgactacgcccggaagatggcgctcgacatgcgcatgatagacccgcactacgaggaccatccggacaacaaggcaagccactgcgccaaaatgattgcggagtattatcatatatacgaggcgcaaaagggcacgcagttcgtattctcggatttggggacatacctgccgggcagcgggtggaacgtgtacagcgagataaagcggaagttgacggaggattacggcataccggcgggcgaggtgcgcttcatccaggagtgcaagacggacaaggcccgcaaggcggtgatagaggccatgaacaccggaacggtgcgtgtgctgttcggttcaacgagtatgctcggaacgggcgtgaacgcgcagagaaggtgtgtggcaatccatcatctggatacgccgtggcgcccgtccgacctcgaacagcgtgacggacggggagtcagggctggcaacgagatcgccaagcattttgccgggaataacgtggatgtcatcatctatgccgtggaaaaatcattggacagttacaagttcaacctgctgcattgcaagcagacgttcatctcgcaactcaagagcggagcgttgggtgcacgtaccattgacgagggggcgatggacgagaaatcgggcatgaacttctcggaatacgtggcgttgctctccggcaatacggacctgttggacaaggcgaaattggagaagcgtatcgcttcgctcgaaggggaacgcaagtcgttcggcaagggcaagcgcgagtcggaactcaaactggagtcaaagacaagtgaattgcgcaacaacacggctgtcatagaggccatgacggaagattgggacaagttcgtcgccgtctcggaaaccggcaaggacggcaaccggctcaatcctgtcaaggtggacgggctggattcttccgacgagaaggctataggaaaacgtttgcaggagatttcaaggaatgccacgaccggtggcctgtacacccgtgtcggggagctttacggcttccccgtcaaggtggtcagcgagaggatgctcaaggacggtctggaatttaccgacaaccgcttcgtggtcgagggaaactacaagtacacctataacaacggtcatctggcgatggccgatccggtagccgccgcacgcaatttcctgaatgcgctggagaagattccttccaccatcgaacagtacaagacaaagaacgaggttttggaaaaggagatcccgcagctgcgtgagattgcggggaaggtatggaaaaaagaggacgaactgaaacagctgaagtcctgcctggctgcgctcgaccgcaagatacagctggagctgtctcctgcatccggacaggacgtgacagaaaacacggaaaatgaaaatatccggcaggaggcggtattacaagacagcccaagccggaggagtatgaacagacctgtaagatacggattgtaaaagtgggccggctgcattctacaaaacagaaaaggtggaaatgtatcgaaacgtttccgccttttcggttttacgggttttcctctaaagcaggctttgagccattagtctaaattcaaaatcccctgttcaataatttcgtttaaggaatgctctttgagaatttcctgatagtctgcataaaaatccttgtcaagaccaatgtacacgatattgtcatgcaatccttccatttcatcaagagctgaatgtaatttacatttctccgtgggacagtcttttactattttcctgacttgctccaacttatttagcagatcgtcatattgcgacactcctttagtcgttgcctgaatttggtagttattccttttggatggttgaatattatggttcggatccaataagactatatgaaaaatggatgagtccctatcaaaataccctataatacgtccggtacttattgatattgaaaattgcatgatgggaaattccttgtcattggctaaaacctcttctggcaaccaagtcagatcactccttttgaccggtatattcttttgattccagtcaatcgggtgacatcgaagggaatcactccccttgttctcttccaacacttcttgcggggtcatttttcctaaagtagacaaccgctcccaaagtccaacatgccacttggaggaacaacttcctattccaaaattgtcaatctgtctgaagtcggaaaaggaaaatgatagcttctgcttttttatttctttttcctgctcggatgttactaattgcttatttccgtatttaggggtattactgattattgatttcttcccactttttgccataatattcttgcatcaatttggatgaaataacagtgtcacaacgttcattgggacctttgtcccctcttgcggcaatccatggttgttcagaatgagatagtttttcaagttccgctccactgtattttaaataattttccaatatgaaatccacaaactcacgatcatcattcgataaccttacatctttattcaagcaatcatcaattcctatttcagaatacaagaatttggattcactgaatcgattgtatatttctcgattcacaggaccatgaatccaagcctcaaaatcaccttcaaacatggctttcttatttattccataagaccatgcttgaacataatataacagcttctgtaatttcaaattaatcaaagaagcgtttttatcttccgacttcacttgaagtatgatataatcagcaaaatcattaatagagttcataacagccatatttaattagtatcggtacaaaagtaaacaaaaaaagtattctcaatatgaatacgttattaattttaagaatatataattgtttcatttttctttttctctgaatctccatatccatactgttaatttcttttaaggaaaccacgccattccgaatgtatcgtacgaccgtaaaatcatagaatgcggctatcgccacatcagtgctattaaatgttaaatatcccaattatccaaaatccttttccttctttaccattataatacagtagtaaactaaaaacaaggaataatgatggataggaaaaagaaaacgttactttttccattgttggatcggacactggaagcattgaaaggacaacgtagcatgcgaacgttggagaactaccacagtagtataaataaggtaaaggattttgtgggcgatgaatgggaacgcctgacggtagaagacatcacccggtgttggacggacagattcaccgcatggttggaaaagcggcacgccgacaaacctcagacagcggacttctacctgcgcacatttcgggcggtatacctccatgcgctggcgctttcttccgagggtacggacgggaaacctttcggcggacatcacaccggcggcaacttccctgccaaacgtgcgctccggaaagaggaggtacaacggttactctcaccgaccctgcggcagacgctgccggagaaccggcgtgaggcgttggacgtattgctgttcatcctctacgcacgcggaatggtattcaaggacgtgtacgggctgacccaccggatggtgacggacaggcatatccgttacctgcgcagcaagacaggcgtgcccatcgacgtggaggtagtacctgaactggaagagataatggaacgttaccaccgggaagattcgccctttgtcttcccatttttacacgaggcaaggaaaggatgtcccggaaaggaactatcggaggagtcggccctgcggcggatcaaccgcgccacacgcgagattggcatgaagacgggactctccgtgccgctcaccacctacgtgctgcggcacacgtgggcgacactgatgttggaggacagccagcctgtggaattgatcagccagtgcatggggcacagttcgatacgcaccacgcagatttatctttcccgtatcagcagccataaggtggatgctgccgtaagcggcatgtacgaccggatgctgcgtctgcccggacataaaagaaaggaaagggacattctgtccggacatcaccggaaacccgactcccttgtatcgcagcctatggaaaacaggaacgcacagccatacatccctctaacttccgaaaacaaaaaatgtccctttcttgcgaagaaagagacatccgtttcgtgtcgcatgaacaccataatatttttcgccacaaaagtatatatttcacagctttgctgcaaattttcttccgcttttttctccattttacccgatatttcttcctgccttccttttctttattctctccatgcgatgtgaaacgcattttcaatagcctgtatcacagaattatacaaatcaatttcccataatgtctctttcttcgcaagaaagggacactcatcaagggtcgccggaatgtatggaaaagcgaaaatcggacaggaaaatgaatcctgtttccttttcccgtccaaacacagtgaaccaccgtatttgccgtacagtttgcgcctgtgttggcagtcggaaagaaagcataaggagacgatgaaatgaaacaagtgacaagcgaaaggggcgagacatgctgacgaaccccacacgatacgggctgatcgcctgccgctatctcgtatggggctggcacaacggcgtctggctcacaggaccggaaatagcggagcgttacaggatgaacgtacgggccctctcgcccgcgttgcaacgtctggtgatggccggcatcctgcgctcacggcgcggagggacgaagccggggttcatgctcagccgcccgcccgaggaagtgacgatgctggaggtggtacgcgcgttggagggaaacttccgcatggattgctgccgtgcagtactaccggacatccggtgctcgtgcgatacggactgctgccgggtctgcggagttttccgtgacatgcttgacgaccttcggcgaaggctgtcgggcgtttcgctcgaagaccacgccgccacggaaaaattttcggggggggtaaaacactgtaagccaataggatagcgcatagtatccaaaatgccgggcgataacacatgagaagtgacaactaaaattaaaaaaatacgagtatgagaaaaagattcattcctgccatgttgctggcgacctttcttgccgggagcgcccaagcggaaatcgtgtcggacagtctccgcaccacggtgtactaccgcactgcaagctcgcggcttgaactcccgtacatggacaatgaccggcatctgggagcactcagcgacagcatccgcggcttgggagccgaccctgcagtggtgctcaggcgtatcctcatccaggcgtccgcctctcccgaagggaacactgcattcaacaaggaactcgcccggaggcgtggcgaggatttacgcgattatttaaagaacaacctctcgctgcccgacagcatcttcacgctccaaccgcagggcgagggctggagcgaactggctgaaaagctcggccgcaccgatgccccctggcgcgagaaggcgatcgccatcatccgtgacacgcccgaatgggtggtgcgcgagggcaaggtggtggacgggcgcaaacgccagctgatgaaccttgccggcggtcgcgcgtggcaatatatgaaagagaacctctttgacagcctgcgcagcggagcgttggtagtatgcgaggtggaacgcatcgagcgcgtgaagcccgaacccgaatcggcacaggcggaattgaaaccggcacccgaaccggcagccgacaacgcaatgaaccccgatgacacggcggacacctccgagaaggagatcgatacgacagccacactttataataaggaggacgaagcggttccgcaggataacacggacaagacggaaaagaaaccgttcttcatggcggtaaagacgaacctgctctacgacgtggccctcgttccaaacgttggagtcgaattttatctcgggcaaggatggagtatcggcggaaattggatgtacgcctggtggtgcaaggactcgaagcaccgctactggcgtatctacggcggcgagcttgacatccgcaagtacttcgggcggaaggcagccgaaaagccattacagggacaccacctcggcgtgtacgcccaaggtttgaccttcgacttcgagacgggcggcaaaggatatctgagcaacttcagttacggtttcgggttggaatacggttattcgctgcctgtcgccaagcgtctgaacatagacttcggcatcggcatcgggtatgacggtggaaaatacaaggtatataccccggaagacggccattatgtttacaaggaaacgaaacagcgccactggttcggccctgccaaggcggaaatctcactcatctggctgctggggcgcggcaacgagaacgacaagaaaggaggaacgaaatgacacacttatataaggtaatcacgggatgcgtggcggcaatgctgctaccactgctcacagcatgcgagcacaaggacctgtgctacgaccatccgcactcggcgagcgtggaggtggtgttcgactgggtgaacgcgcctgacgccaaccctgccacaatgagcctctacctctacccggaggacggctccgagccgatgcgctacgagttcaccgaccgtgcgggaggtaccatcgccgttccggtgggtgtttacgacgccatctgtgttaacagcgacaaggagacgcaccgtatacagaacaaggaacgacaggaaacctttgaagtgacaacgggcaacacccgctccctgcgcgggacattgtctacccggtccgagacggcgccgctggcacgcggagcggaagaggagcgcagcgtgatggagccggaagtcctttggagcgaccatgccgagggtctggaggtgcgtctcgaagcgggcgtacagaggctcgtccttaccccggaattccgcgtgaagttgtgttcggttgagatccgcaacgtggagaacctgcgacacgtggccgccctcagcgcgtccgtcacgggcatgtccggcggttggctcccgggtatcgactgtttgacggacgagaaggtgaccattccgttcgaggtgcatgccaacgaggagaaaaccacgctgacgggcagcctgaccttcttcgggcactgtccgaaagaggccggggagcacaagctgatgatctacgcgctgatgtcggacggcaacacctattattacgaggaggacgtgaccggccagttccatgacccggcacaggacccgacacacatagtgatcgtgctcgacaagctgccgcttccgaaacctgtctcgggaggcggaggaggtttacagcccagcgtgaaggagtggcaggaggtccgtattgatttgccgatgaactaaagacagcgagaagaaaacaattagaataagtaaaacaataattatgaacaaagcgatttatatatgtgcctccatggcgttgatgctggcatcgtgctccaatgacgagacggtggagctggcgaaggaaaaaggcatcagctttcgcggcatggtcgggctgaatacccgtgcccagaatacgggcaccacggaattgctgggcggcaaggcattgtacgtcactacattcaagccgggcgatgacggtgatctgctgtatgaggagacggaatacacctacgacggctcggtatgggtagcgactcctgagcaatcatggggcggcaacgacaagctgagcttcttcctcacctatccaaagctggacgagtgggaaaacggtgctaaactgacgaaggacaataagacggtcactgtcaccgtggacggggatattccccggcaaaaggactatttggcggtctatttgaaagatgcggcgaagacccagcaaggtgccgccgtaaacgcgaacttgcagcatgtactctcatccgtcgagatatgggctaaaaatggcaacaaggctttccaatacaaggtgaaaggaatccgcatctgtggtgcaaacagcataggtggcataaattttgccggccaattcgcctgcagcaataccaacactcccaagaattatgagttgacttatgccaacgcgataacgctgggcggggatgccaagtctatcatggggccaaaactcaatgataccaataaatccgaaaacgccatactgattccgcagacgacaacagaatggaacggtggggatataagtgcggacaacgtaactccggtaacaggctcatacatctccgtgttgatcaacctcaccgccacggccggtgcggtgatttacccggcaggttcaacggctgaccaagagacctacggatgggtttctgtcccggtggcattcaactggacaggtggaaacaagtatgtctatacccttgacttttctgacggagcagggaaagtagaccccgtcaatccgggtgatgccgtcgacccgggcggaaaagaccccaacaaggcggaacctatcttaggcggtttgatcaagttcggcctgactgtcacccaatggaaccaggatcgcaacgatgtggacttgaaagatgatagtaagttcagtgccacggtagacagttgggaagacgagacgaccgatgatactatcctgaaataacatgtaaccgtataaacaaaagattatcaataaattattaacagttacttaatcaagtaattattttttttattcactttttaaacatttatttttattatgaacaaagcaatttatttgtgtgcagcggccgctctggcgttggcgtcatgttccaatgacgaaactgtggaaatggctaaaggtgacggaatcagcttccgtaccgtagcaggattgaacactcgtggtgcagaaactgttaccgataatttgaagacaaatggtgtatgggtgacttctttcaaggaagacggaagcatcatgtatcgtgaagccaaatacacggagagcgcaggtgtatggtctgccggccagttctgggagcaggagaacaaattgaacttctacctaacttatccggctttgacagagtggcaagctaattttgagttgaccgcagacaacaagcaaatcacaggcttcaaggttgccgatgagatcgaaaaacagaaagactatgtggctgcttatgtggaatcaaacaagacaaatgctgccatccaggcggatttgcagcacattctttcccagatcgagatccaggcaaagagcggcaacacatcgtacagttacgaaatctcaggtgtgcgtatcggaaagatttcttcaacaggtaactatacgttcccgactctggctgagaaattcggtactttcgctgatttgagcgacagcaagaattacgagtacacgattgccaatcctgtgacattgaacacggcagacggaagtgtgtcaactcttaaagtcgctgacttgggcaacgccatgctgatcccgcaaactttgaccgcatgggatggcgcaaatgacggaacaaatgcaggaaacaaccagtacatctctatcaaggtgaagatcaccaaggtcggagaaaccaatccttactacaacggttgggcagctgtaggtgtcagcggtgcttggacggctggaaacaagtacatctatgttttggatttgacaaacggtgcaggaaaggttgacccggacggaccgggcccggaccagacagaaaagccgaaccaaccgggagaagacatcttgggtgaccagatcaagttcacggttaatgtggtagaatggaatgatgttttcaacggtaccaacaatggcaacatcaacatgtaatccgacatccatttaatcaaaaatcaataaccaaaccgcacttccgcccggtggctgtccgcacacacggccaaggcaggaagtgcaccccaggccggacggggttgaatgtccctttccggtcacacgaaaagataactaaaaaaagaagaactatggcaaataaagcgattcatgtattggcggcagcggcattgctcctctcatcgtgctccaacgacgatacggtacaggtagcccccgggaaggacatccgtttccgcacggtagtgggcatgaacacccgtgcccttcccgccgacctcgccgggctgagaggttccggcttcaccgtatcggcgttcgccactgccggcaacgagaagtacgggttcagggacctggcattcacgcacgaggcgggcacggagaatgactggacatccgatcccgtgaagtattggccggatgacggcagcgaacttcatttcgtggcagcctgtcccgcagccacggactggggcggcacctatgagggtgacaagcccggcgaactgaaagtgagcggcttcagcccggcagcggacatcgccggacagaaagacctgctggcaggttatgcctcgggtaacaggaacaacgccgccaagacggagatagagctgcgccacgtgctcacgcaggtggaggtgcgtgccaagagttcgaacaatacctaccgctacgacgtgaaggcggtgcgcatcggctccgtccgctccacgggcgactacacgttcccatcagcgataaataccgacggcagctggacgctggaagagggcagctacgcctcatacgccaccgcagaactggcagagccggtacggctcacgcctgacgcgaaagggctgatgggagacggcggcacggcgatgctcctcccgcaacagctcacggcatgggacacagagaacgacaaggcgaacgccgcgaacggctcgtacatcgccctgctgctgaagataaccaccagtacgggcaggcaggtctacccctacgcggggggcgaatacggctgggcggccgtgcccgtcgggggccacgcggagagcaagaaaaacgtctggcagccgggcgacaagttcgtctacacgctcgacctgagtaaaggtacaggtatgacgccccccgacagctccgaccccggggaatccatcctgggacagcccatcagtcccgaggtgacggtcagcggctggacgatccgcccgcaggatgtgaacttgtaagcaaaaaaacggaacgaatctgaacgacgggaaaataaggaaacaggaaagaaaaaggaaaaagaaaataaaaactgataaattatgacgttactatcaagaaaaagactgatgggcatatcgctcatcgcattggtggcgctctccgcctgtacggacgatgtggacggagaccgtggcacgggcctgaccggtcaccgcctgtcctttatcgtgagcatggacggcgaggaagcgcagacgagggcggacggcagcgaaaccactgccgccacgcggtacctcaactcggtggaactgaaaggcaggcagggcgggaaaagcgtctacctgcaggctgaagaaacggacggatttcccggcgacgggcagccattgacgcgcggcacgcagatcaattctgcggcaaacatgaacgcctttgccgtgtccatctactccgaccccaccggtacacccgatcaaatgtataataagaaagtggagaatgtttcctccacatggactcccgagaaagactatcactggtcgaaagggcagaaactgagcttcttcgcctggtatccctacgagaaggtatgggacgtgacgaccgatgagaataccgccggtgcacccgtactggcttataccgtaccctcaaaggtggaggaacagcaggacttgatgacagccgttagactcaatcagtccgaaactgtgggcggaaccaaattgcaattcaagcacgcgctctcggcggtgagattcatgtcaggttccagcctgtccaagtgtacattgcactacatcaaattgaaaggggttaaaaacaagggagcctattcgatggaaacacagggctggacactggataatgatacgacgagctacacctttacgcttgaaaaagagatggacgggacacctggtgcgccgatcacggagggagaccagaccctgcttttaatgccgcaggtctttgaagacgagaacgcggagctggaggtgtatatgagtgtaggaatctacagttatacgcttaccgcgaaactgaaggatgtcacgggggaatggaaacccggcaagacctacacatataaaatatccgatgccttgtcggatatcctgaaggtggacgtgaatttcttcaagggaacgaactacactgtacataacatcagtgccaacggtgatccctacaccatagacatcacctatccttatcccaatcatgtaaagaaagtggaagctcggcttaggtactcaaatgcgcatactgttgagactttcgacctgaccgggaaaacaagcgtgagccggacttccctatgcatgaacaataatggagacccgagcaaagctatggcatatagacaaggtttcatgatagaaataagaatagagagcgacgtggaggtaaaaataatagctccgcaccgtgatgccaatgcgtcacgggaatacacatacagtccagcagaaaataacgacacgtggtactgtgtatggtatggagacatgtatccgccaaactacattgatgcaacgtataaagtgatcatatcacgagaaaatgcaacgaatactttaatgacaatggaaggggctgtatccttaaggccaaactattatgaggtggatgtaaaccatcccaaatacggtaaaggacagtggggctttcctaacgttatgggagatgaatggacgatacatagaggagatatactatatgatatggtaagggattgtgctcctcctgggaataatagcctttatggaagtaaaattcttagtaataatctcggtgctgctgtttggacgaatcaagcttgtggttacgcctataatggagcttattgctactgggcgataaaagctggttctattagaagttatgacaaaagttatttcgatagcttacctcatcaatctaatagtggaaatgctcagttgactccaaatgccacttcaagaaggggcagcacacgttttgtaattatgtattaaaatccgttcaaatttatcaacatcaattgaaacattcgtaaaaaagacaacatatgaactacaagaataaactgataggcatgtcgctcatcgcgttggctgctttttccgcctgtacggacgaggcggagaacggtagccgcccgctgtcgggtgaccacagcctctcctttgccgtgagtaccgggaggataaactcctggaagccgacgggtggcacacgtgccgcttccggtttcgggatggctatgcgggaacttgcctccatcgagatgcaaggttctatgaacgagtccgtctgcctgcaagccgaggtgatcgaagggttttccggtgacaatacaccgatgacgcgcggcacgcagattgacaaggacgaacaggataagatacagagcttcggcgtgtcggcctacaccgacaaggacggcaagcccgactacatgtacaacgaggaagcgacgaagaacggagacctttggttcccgggtgagaaatactactggcccggcggcaagacactgagcttctacgcgtggtatccctacacggtggcaggcatgacgctcaccgacaacacccatgccggcgcacccgtgatgtcctatgccatccctgaaaacgtggcggatcagatagacgtgatgacggcgaaagccatcgacgagaatgaccccaacagtacgaccggcggcacccaactgaatttcgaccacgcccttgcggcggttaagttcgtaacgggtagcgacatgcccgaatgtaccgtgaattccgttacgataaagaacgtgaaatacaaaggctcttacaacttaggcacgggcacgtgggagttgaaggatgacgttaggaatttctcggtggatataggcacggatgcggacggtacggaagatgtagctgtgaccggggatgaccagactttcttcatgatgccgcaggcattcgagaacagggatgcgaaaatagaggtcaatcttacgatcgagggtgaagaatgcatactttacgcatctctgaaggacatccacttggacgaagccacaggagaaagcaaatatgaaaaaggcaagacctacgtctaccgcatctcctatacatccatgtccgtcaatgtcacattcttcaaggataggaatggaacgaacgggtctccttacacatcccacaacatcagtgccaacggcgacccgttctgggtagatatcaagtgtccctctgccgttacggaagcgacggtacgtttcgcatacgagcagaccgatgcaagcgggaacatcacatacgacgtaatcaaggatggttatgcattgccgaaaggtaaaggacagtcttcaacaagattcatttccccatgtctgaacaatctgggtactccggacaaggcgaagaagaccaccgctacttttgtcatacaagtgaagatagccagccaaagcaaggtgatgatgattattgatcccgaaccgcaggtattctatcctgacttggacagtgagacgtggtacacggtatggaggggaactatgtatccgccgaatgcagctttggctcctgaaggtgatgtatccacttatacaatgcttgcacgtaaaaacgggaacaatggcggtctgtgcaattggacgacggcaaccaaccttatggcggtatactgggaagtggacgagaaccacccgatatatggaaaagggaaatgggcactgccctattgtttctggagtgttgcccaattaagaaaaacccgtcttatcgccttgggaatcaattacacaaggccgttaggtttgaatacggatttgtatggcgacgcattcaatcaaactctttattggacaagcggtaataatgggaatggatataaatgggcaataagactgagcaacgatatacagacggatgccagtattttgcaacaatatcctcataatgaaacatcccatttggcttcttggttatatacctccaatctgggagttcgcggatatgtagatgtattgccaaataggtaatatgaatgaatattccataagcaagaaattggaatcaataaggatacacttaataaaagacatcaagactctcccaggcacagcgggagaattgtataataccctaacagcttgccgcccttgtgaaaggcccggcaagcacctattttaataaatgcagaatacggatatggaaacaacgaagatacttgaaagggaaagaggcaacaaggatgccgtccacctccactgggacggagcggacgagacttggaacgcctacggcaaatcggcggaaaacgcccttgccatcaaccccgaactccgcacgctgacagacaagacggaactggacggcacacaggtaacgcacctgaaagtgaccaccgaacagttcgaagagtacggccttgccgaccattgcgtggcggtggacgacgagcggctggaactgaaaccaaagaactaaaagttcaaaaagctggagtacttaaaaatacaataaacttgaaagaacatgagaaaagcatttatcaaaacactgttgctgctgtccgtgatactgacggcggcatcctgcgacaaggacgagaaggaaatcggctacgacgcgctgccccaaaaggcgcagcagttcatcgcgcagtacttcccaatgatggaatgcacccgtgcggtgcgtgacaaggacggcggcacgaccgagtacgaggcatggctctcggacggaacggaactggagttcgacggacaaggcgagtggacaagcgtggactgcaagttctccgcactgccggacggcatcctgccggaagccatcgcgacggacatcgccgcccgttaccccgatgccgtaccttacaaggtggagaagcaaccgggcggttacgagatagacattcccggatgggaactgtactacaaccaccaaggcacgttcatccgcgccgaacgggattggtaaagcctgagaactcaaaaactgaaaaactaaataactcaaaatgccatgaccatatacaaaagcagaatcgcccggctgctgcaaggccggctgaatccctacgactacgtgaccctgccgttcgtcaccctgaccgccctcccttacggagagaaaggaatttgggaggagatggagatgagcatccaccgccgccagtatgccgaatgcttttgggcgtccctgctgccgtccctgcttttgggctggctgctgtggtgggtttttgccttcctgccgctgttcgcttactacctcctttactgggctgaacgcttggctgtcggccattcggcgtttgactacgaggcggaaaaagagagcgaggaagtaagctacttcgtggtgcgcaaacgcttcgcttggtggaaatggttttggaaaaagaagcttccggccatcgaccggagctggttctgctaaaggaacagggctgactcctatacagctactgcaagcgtgggctgccgtctgtttaagttgtgttcgggcatcctggggccttctttatgattaaacgagatgcagccaacgcttcctttcacattcctctactaccgggtggaaaaggaaagcgtggagataaaggagataaaaaaggtaaagtgcaattcagacatatatacgaagagttacgatgaagaaaacggaatgcgcccttgtgaaagtccgccaaacatccgccaaagggcagcaatgcccggagggctatatttttttgatttttaggaaagttcaattcccaaaaggaattggatttattaagtggttttcccactttttgtagagaaaacaaggcccgcacttgtgaaagcccggaacttgtactttagcatggctgccttgcaggttttaccccggcaggcttgccatagaatatagagataaattttcaaaaaagtcagtcacttcgcatcagcggatgcggcacaacaagtgaaagaaatcaaaatgtctggaagcttccacctgtgacagtccgaagcttccgttttttttatatggacagaataaattcaaaaacaagaacgatatggcaacattaaaattgaacaaattcatacttttgccgtgcaggacggtttccgccctcgtgcgttgcggctttgcggtaactgcggggatcgtgatgaaaacgttttcccccgatacgggccgtatcttttacgaaaatgcagtgagtgactacctgatacgcagattcgcggaaatcatgaggtggtacgaggactgcccctgcccgataggattcctcacggcaggctcgccggtatgggtattccttcctaaagagggacaaaaggaaggtgacgaacttctaaggtcggtacgcaaggagatagacaaccgccccatacgcgtgattacccgtgagaattaccgcagatgcataagccttcccggcccgctcttaagacggctcgaccgtgtggaagacgacctgctctccgagctcctgtgccactccctgctcttcaggcaggacggcacgtatgtggacgcacgcagatgggaaagctccaggaagggcgacccggtgcacggttttatctccgacatgctggcggcgtgcctctccgcccgcctgcccatagtcgacggtgacctgcccggcatcctcctgcggatggcaaggcaccatatcccgagcgtcagggcgaaacagaaagaacaggacaggatgatcctgcaagcctgtccctcgctaaagacgatgaacatcagcatacagtgaaacagaaacctttaactgctattattataaataaaaccataagaaaagaacaatcgaatgaatgacaagaaaaggacaaaggacatgccccgaaaaggcgtatgggccttactatgcgcggccatgctgctgcccgtagcctgtgaaacggtctacgaggacgagacggtgtacaacgacatcgagatacctttcacggacgacttccgcacggacaccgtgtcctacggcaagctgccggcggagcacgcccgccacatcctgaaccttgccgacccctcgtcggaaatcgtgggcaaggcggactacaccttccgcacggacgaactcatcagcgtgcggcagaccgccgaagacgattcgctccgcatcaccagttggtcggcaaaaaccatttatgaggtgacgctcgaaatgtatatccccgaagtcggggaatacctgccggtggcctacctcgattccatccccggcttctcccgcttcacgttcaagccctcgttcgtgggacggcgtaacgtgtgccgcacggcggacggcggattcgtcagcttcgagtgcccgcacctcgacatggagcacatgacggtacgtcttcagagcgacgacgaacatttcaagagactgcagaagatagacgccaagtggacgtgcagcttctccaattacagctggacacccaccgcaggagacaactgcccctaccgggagttgcgccccatctacgcccgcgaatgggtcgttatcgtgaccaactatgcctacatgatgaccacgcccgaatacgactacgtgatgtcgcatttcagcgaggtgatgggcggcgacctgtgcgacaacgacaagattctgttcgatgccgacaagtaccagacggagaaggcacgcttcaaggccgagaagactttccgcctgggacagagcagcccggcctacggcggactgggcggcggctacatctggacggtgacggactggaacttctacgggcactacgcctcgttcagcggctgggaggccatcgcccacgagttcatgcactgcatgggctactcgcataacagcaacatgacttatggggcgaacaacgaggccggcgtaaacgtgggctggacggtgttcatctggcagctgcacatctggctgagccaccaccaaaaggacttgccctatctggaccgcaaccttctgggcttccacaagccggagaacgcaccctaccgtgactgcgacatcaatgccatcttccaagacgacgcggtgctggagcagaacatcgagaaattttataaccaaagccggctcgtgaaatacttcaccgagcacccggtaactgaaggaaaggaggaaacgaaatgaagaaaggcatgatgatatgcgcaggcatagtaggaatattgacggcctgtgaacagaccgagatacgtgaaatcacggaagaccgctacgtgccgcagccggtggacaccgtgaaagtgacggacaactactatctggacggctacacggcacgcaccgccgccgacttgggcgagggacggacgttgcaagccgtgaacctctgcatggacgaaggagagctgtacgtggcaaacgcagcaggaagctgcgtggacgtgttcgacgcggaagccctgacctacaaacggagcatcgccaacgctgaccgcacccttgcccgtgacgtgtacgtggagggcgaccacctgttcgtggctgccgggaacaaccgcgaggtgcaggtgttcgacaagcgcagcggagcgtatctgacccgactgggtacaggttcgtggccggcaagcaacgtgtcgtgggctggttgtgtggcggctacgaaacgctttgtctttgttcgcgattcaaaggagcagaacgtgcgcgtgttcgaccgcgaggccgtctcgctgacagcggcgaacaacaacaccgtgttcgccaagctgggcacgccaggcaacttcatcggcagcggcacggaaccgcagggggattcctacgacatggaggtcatcggagactcgctgtacgccttcattccccgttcgggaactatctacgcatggaagataagcgagatagaaagccggaaagacaatacacccacttccgtcaccacgccaaccggcgtaaagatccgctcggtggcgaaaggcaaggacgacagctcgctgttcgtggcgatggagaaggacggcaagatgcaacttgcggaaatcaccctctcggacttccagagccggcgtttcgaccgtccgctccgagagttcacggcggacagccgcgtggcattgccctcgcagcccatcatcgcatacctttacgagcggctgatactaaccaataacgacaagctggaacgctgggagattcggaacaatccctcgtatgtgatacggccgggaggaaaaggttcggaataacaaactgggaattgcgagtatggggatactgttgcaacacaaggtgcttgtcggttatctgattcttccggttatcatcggaagcatgattgccgtgttcttccgtgaacactccaagattgccgggatagaggacgcggcccatgaaattcatcatgtgcgcagcgatataaaccgtgcacaccttcaaataaccctgctctccacgagtggggagtcagcaatggcatgggatgacggggattttgctgcttatcagggtcttcggacagagacggaccggttcttgtcagagctgaaagggcgttgcgcagagtttgtccgtcccggacagatagattccctgaggttcttgttggagagcaaggaaaagcacctgcaacagatcatggaaattctacgaagacaggaacaggcggacagcctgctcctgcaaggcatcccttccatcccgtacaagggaccttccaaacgaaaaggactgttcgggttgccgggcaagaaaaaaaggacggaagatgcccggtttcttgagaacctacagcggataggccggaaaataacggacatatataaggagacgcaagcggacatacaccgtcaggcggacagccttgagacgcggaacaaggaattgaatgaccgcctgtacaagctgataacggacatggacaggcagacggacgcctctttccttcaaaaggaagcccgtatcatccgtgcacacaggcattcgatggctgtcatgagtgtccttgccgggctctcccttttcctgctgggcatctcctatatgatcatctgccacgacatccgcataaaggcaaagaacgggaaacaactgaagaaaacggtcaaggaattgagaaaggcactgaaaaggaacaaggaactgacggatgcacggcaacgtaccatacggatggtcacccatgagttgcgtaccccgttgacatccatcgtcggctatgccggactgttgaaaggtaaggcggataccagcggccgttttgtggaaaacatcctccaatcctccgcccgcatggcctccatgctgaattcgctgcttgagtttttccgtctggacagcgggaaagagaaggtgaaccccgccccgttccgcctgcaggatgtcgccctctcgttgcaagcggacttccggtcaatggcggaaagcaaagacctgcttttctccgttgagtgcgaaacggaagccgtgctcttcggagacaaggaacgcgtcatgcagataggcggcaacctgctctccaacgccatcaagttcaccaggaccggaaaagtatcgctgggtgtttcctatgatacaaggatgcttacccttgtggtggaagacaccggagacggcatggacgaggatgaacaggaacgggtattcacggccttcgaacggctgtcgaacgccgccacgcaggacggtttcggattagggctgagtatcgtgaaacaccttgttgaaatgcatggcggcacaatcgccttgaaaagcgaaaaagggaagggaagccggtttaccgtaaggatacccatgctgcctgcggaaaccttcataggaaagaacgaaaacgggttgccgcaaatgaatcccggcaggacatattccgttatcgcattggacgacaacgagaccgtgctttcgctcttcagggacatgtatgcggagaaaggcgtccattgcgacgctttctgcaacataagcgacgtgatggaagccatgcgtgcaaggaactacgacctgctggtcacggatctgaagatgccggaaatcaacgggtacgaggtgctcgaactgatgcgctcgtcccatataggcaattcaagggagattcccgtgatagtgtccaccgcatccggctgctgctccaaggacgagctggaggcaaaagggttcagcgcctgcctgttcaagcctttcagccagtcggaactgctggaagtgtcggaaaggtgtctccgtcccggtgcaccggatacggaccggccggacctgtcccccctgctggcattcggtgacaggcgggagatgcttgaccgtatcatttcggagacggcaaaggacatgcgggacatcagggatgcggaagcctccggtgacagggaaaggctggaagccttggtacaccgtctgcgcagctcatggtcggttatccgggcggacggcccgctgcgtgacctccatgcggcattgcacggaaacggcaacctcatggaagaggagttgcaggaagcggtacacggcgtcctgctcatgggagagaagataatggaacaggcaaggaaagaaaaagaacggtatggcaaggataatcgtggttgaggacaaccccatctacaacgactacgtgtgcaacctgcttggaaaggaaggtatcgaatcccggcaggcatacagcctcgggacggccagaaaactcatccggcaggcggatgagcgcgacgtggtgcttgccgacctgcggttgcccgacggaagcgggacggacctgctccggtggatgcttaccagcgggaagcggaaccctttccttgtgatgacagactacggggaggtccatacggctgtggaaagcatgaaactgggtgcaagggattacctgcaaaagtccctgttggaggaaagacttgtccaggcggtccgcagtctgttgaaagaggaggtaaaggagcatccccatattcccctgttcgtgcgccagagtgccgcctatcaggaaatcaagaggagcatacggctggtttccccgacccgaatgggcgtgcttgtacaaggtgagaacgggacggggaaagaacttgtcgcccgccaaatccatgacaggagcaaacaggcggggaaaccgttcataaccgtggattgcggcacgctctccccgcaactggcagcgtccgccctgttcggtcatgtaaagggagcctttacgggagccgacagcaacaagagaggctatttcgatgaagcgaaagaaggcacgctctttttggacgaggtcggcaacctgccctgtgaggtacagcagatgctgctccgcgccatacagtcgcgcacttaccgtccggtcggtgcaggtggagacaagacggccgatgtcaggatcatagccgccaccaatgaggacctggcattggcgattgaggagaaacgtttccgccgggacttgtacttccggttaagggagttcgtcataaacgtcccgcccctgcgggagtgccgggaggagattctccccatggctgagttcttcctgtcccttgccggtgaagaatttgaaaaaaacgtaaacggattcgattccgaagcgcggaaagcactgctgtcacattcgtggacaggcaacataagggaactgaagcagacggtaagatcggcggtactgatggcggaagaccatgtggtccgtgtccgtgacctgcatctggaaagcccgcaccggacaatctccggcagccttgccctgcggagcgaggaaacggaaaaggaaaagatcacgaaagccttggagcaatgcggatggaacagggagatggcggccggactgctcggcatcgggcgtaccacgctataccagaaaatgataaaatacggcatagcaaaatcgggtatccggacagtatgaagagcgtgacaccgttcattttccgaacaggcgtgtatgtctggaacggaaacgccaaaggcataaaaattttctgaaattatataggattgtcagccagtgctgtatgaatataatttttcaaaaatagtactacggagtgatatttgtcttacatgttatgtgtacacatggtaaaaacaagtcgaacatctaaaaacaaaagcgatgaagcacctgatactgaagaatacgcctttcttccggctgatagaaatgacggacagcccggattattccaacatacagaacgattacgtcgattttgtctcggaagtcatcaccctgtgccatgaatccgcggattgcggcaacctcgtctattttgcactgttgttcacggagatagaactgcaataccacccgcagctggatcgtggggacttgcgggaggttccggacgtctatatacggaaagccctggactttgtccgccggatgataaagtcgatgggctgtgttccgtccgcctaccccttgcgggaagatacgggaaaaaccgcccctgccctgcaatggacaggaaatgccgttgaccttgtggaactgatctacggtatcaacgaaatgggctgcatcaatgacggggccatgccgcttgggcagctcgccccgctcttttacaggatgttcggcatcaaggcgaaagactgttaccgcttctacgtggacatcaagcgcaggaagagcggaagccgcacctatttccttgaccggatgcgggagaagctgaacaggcgtatggatatggacgaggaaagggaaaggacgaggcggtgagcgatttatcctccatcatcttggctttgtcacaaatttatggtatttttgtgacataattcaagatcgataaaaatgcagagcgtttattctgaaataaagaggattgtggaaagttccgagaacgggacactctttttccccgatgattttgcagcgttgggttcttcggatgcaatcagggcggctttggtacggctatgccgttccggtgtcatcatgcgggccgcacaaggtatctattatcatccgaaaaccgataccaaatggggcagcggcatcataccgcctaccatagaggagattgccgaagggatagcaaagcgggataaggtaaggattgtgccaaccggagcgtacatactcaaccaactggggttgtccacccaaatacccgccaatgccgtgttcgtaacggacggatccggacgcagggtcaatctcgggaaaggcaagggtatcttgttcaagcacacctccgagatgcggatattcgctttccgttcaaggatgatgtcgcttgttgtaatggcgttgcgtgagataggcgaacacaatgtcacgcaagaacatttgtccgtcatcaaacggcatctgtccactgttccgcgggaggattttcaaacggatattcaattagccccgatatgggtgcgcaaaactttatcgaatttatgaattatatggatttgtcccttcaagaccgaagggaaattatagggcgggtacaggcggagaaccacctgaaccgtcaaatcatcgaaaaggactggtgggtcacggcagtgctgagagccttgttttccctgccgtatgccggacacatttcgttcaagggcggcaccaatctgagcaagtgctggaacctgataaaccggatgtccgaggatgcggacatcgccatagaccgggagttcctgggttttggcggcagtttgtcgaaaacgcagatcagtgacaggctgcgccgtgcatcgtgttcatttgtcagggagaagctgcaatacgacttgaaggggcggcttgtggcaaacggtatcaaggaagataagtttacagtgacggtaaacatcacgccggtaacgaccaccgaccctgaaatcatcgaaatcgcgtaccaatcagcttttcaggacaatgcctatatccgtccgaaagtcatcatagaagtaagcggacggtcgatgaacgaaccggttacgcctatgccgattcgttcattcatagacgaggtgtttacggatgcgccgtttacggaaaagccgtttgaagtaagggccgtcgtgcccgaacgcacatttcttgaaaagctattcctgctgcacgaggaatttgccaaaccgaagggactggtgcggacggaacggatgtcacgccatctctacgacgtatcccagataatggatactccgatagcggaacgggcactgaaagacaagccgctgtatgattccgttatagaacaccgtagggtattcatcggattgaaaggtttcgactattccacgctgcgcccccaaacgcttcggattgtgcccccggccgatgtcatcgaactatggcggaaggattacgaggtgatgcgggaaaccatgatttacggggactcgttgccgtttgataaactgatagagaaaatccgggtgttgaatgacaatatcaactcaatgcagcgttaagacatatggcaaagaaaaagagacatcagggacattattgccagatttgcggcgaatacaaggctaacgagaagttcacgggcaaagggcatgcccggcatatctgcaagagttgcatgtccgctatgcgtaatgacaagaaaccgatagacattttgcctgaacaactatccgtgaaccgggaaacaacacgtttcaagaaactggacaaggaagagaaaaacgtgttgaaagcatttgttgccgaagtcgtaaccgaatactggcaggaatacaggcagataccgtttgctgacaatttctccgaacttaaaaaatatatcatcaggacttacgatgaagaatgcggcatcctgctgaaagacgatgccgaactgaagagctattttcaaacccacacgataacgaccatcaacaaattgcttaaagaggaggtgtcagaaaataaggattaaaaaaatgagcggaacaggttccatacttgttccgctcgttttcgaagtagtccatagacttttactgcaacaggtgttccgcatcctttttgaaacctctacccgatgttcaggatattgacatacaaccaaatcgggaagaaacaaaatatcacaattatttttgcgatttatggattttctttgaaataccggttatttctgctgcaacagatgtttgagattttcgtcgcctgcaatccgttccagctcttccttgacaatctgcttcacatcctccttgatgcgcctgtaattcgcctgcaccgtttctttcatgcagtcattgccgtcctcgtccgtaaagtcggtaatgacgggtatcggcttgtagcccttttcttcccgctttaccttctcggcatccacgacaatctcgcaatggaaaatcttctgctcaatgcgttcattgaagttgtcggacacggagccgacaaacattccctgcgtcaaaccggaaatcttgcttggcgggataaggctgtccatctgcgtgttgatggacgttgaaacgtcctgccgattaatggaaatgctctgccgtttctgcaacacctttccgaaacgttccgagagcgttctggcggtttcacccactacctgaccggagaagatattgccgacggtgttcatcaccactttcgcttcgcgatccccatagtcgcgcaccaactgcgagaaatcctgaaagcccagacacacggcaaccttgttgcttcgcgcggtggcaatcaggttgtccaaccccttgaaatatattgtcggaagctcgtctatgatgaccgacgacttcagcatccccttcttgttgatgagcttcacgatgcgggagttgtacagaccgagagccgccccgtaaatgttctggcggtcgggattgttgcccacacataggattttcggttctttgggattgttgatgtccagcgtaaactcactgtccgacatcacccaatagagctgcggggaaatcatgcgcgagagtgggattttcgccgaagcgatctggccttggagctgctcggcagcccctccgagccatgcgtccatgaacggtgagaggtagttctccagttccggataagaggtcagtatcgggaaaatatcctcataacggcggttcaggaactcgatggcatgggggaacgtgcaatacttgccgttctgaaaaattttgagataccagatgatagccgcgaagaggatgatgggcgattccacaaagaagtcgccctgcttttgcacatcgggtaagtcaagggcattactgcccccttctcccctaagaaccgtacgtgagagtttcccctcatacggctcaagcaactcaatatttctatttgttgttagaaatcggctcatactttcaacagtttcgtttatttcgcttgtagcagttgttatggacaagttgccgtacaattgaaccaccaacagatatttcattgacgttccatgcttttgtacaatctatctccttgccgcataacggacaagtccgcttctgcttgttccataaatataagagtgacttacgtcctttgagagattccagcatttgttgctcctttcgctgaaagaaataatcatcatattccgggtcgaaagggtttgcctcccccttgacttgcttgtacggagtataatgtatatccgacaaccttttaagggtcaggtagttcactttcttgctttttgtttcatatttccatgcaaacgtccatttacgcccccgaatttcatgccaatacttatctgcaacccaagacttgcgtttctttgggtggcgacgtaaagcccatttctttgtgaggttgtaaatgtgattgtcgcaaccgtgaaaagcattggttgatgcaccatatcggtaatagtttccccaacctgttatcacaggattgagcattcgtatcagcgattcctgcttacacattttatgtcctttaacgatgtcactgatttttgccctaaagcgtttctgtgcatctttggacggagatgtgtacagccttttgccgaacttccttacattgaaacctaagaaatcaaatccatcgtatatgttcgtaatggtagttttctcttcggataaggtaagacccctttctttgagaaattctatcaccattggtttgacctcgttttccaataattccttatctcgacctgtgattataaagtcgtccgcatacctgataagattcactttgtagtggaatgtcttatagttgatgaaacgtcttttgaatctttcagccaagagtggttgaagtccgtcaagtgccatatttgcaagtgtcggtgatatgatacctccttgtggtgtaccctcttctgtcgggaacagtttaccattgaatacagctccacatttcagccattttctgagtattgttttatccatagggatattttcaataagccagccgtgactgatgtggtcgaagcaacccttaatatctccctccaaaatccattcgggggaatgctggcgatttagaaccgtatcaatctgacgaattgcgtccattgtcctgcgcttctttcggaagccgtaagaaaaacggtcgcctgtcgtttcggctatcggttccaatgccatgagatataatgcttgcatcgccctgtctttcatggtcggtattcccaacggtcggagtttaccgttctttttcttgatgtgaaccctacggagcggctgtggatggtagccacgacgtctaagttcaccgattgctttgtacttgcgcttgggagagtcccaaagctgtttatctactccagacgtattcttccctttgttggaagtaaccctctttactgccaatgccttggcgtaaaaagagtgggtaagcatccactgcaaggttttcaccttgttatgtctgccttctttctgagcctttacaatacgcgcttgtagctttcggacataggtttcacacttagaccagttcataccgtcccaagtcagattcctgctgtcagcaggcgcacacgatgttttaatctcgttcatttgctttcctccttttgaaagttctaaaagttatcttgtaaagagttaccatatacggaagtctgcccactttcgtgtcggatgatgttaccctcattaactcgtgatgttggttcaatccgtatcctccccattacagggcggcattcgctttctccgttatctcatacctgcaccccattcggcttgccttgcggttcgcttactcgcattattacgagagagatacaggcttgccctgttccacgcaattgacaaacggatagtttaggttctgccaagtccgccggcagtgctatgtccgtgtaaccccaacatgggcgagggttatccgactgcttaccttttggtgagagctaaagtatcttgcgctccttcaaaccttacgacggctaaagtcagttcacattacgttaaccatgctatccagcctcgccactcgacggtatgatactaaccgcccttgacgttccctcacggttcagtcttgtcctttcggaaagtgtactttgtcctataagcttagcacaacccatcactggagatgcaccttatagtaggctaccgctgacggaacagcgggttaaatcttgcaatatacattgctgtttaacaatcaattacgtgacttttcaggtcacacccacgacttattgaggttgagcataatggtataggcactctcgtaagcgtccgtaatatcttccatgaagtcgggatgaatgggattgcagcggtgagagcgccgcggatcgtcgaaattgatcacatagaatttcggttttaccttgtagccgtccggatggttcaacaagtgattgtatgctatcgtcgataagtcactgaatttaaagtcgtaaacatacattgagaagcccttttcaatctgttgcttgatgaagctgttcaccactgcatacgattttccgctgcccggcgtacccaatacgatggaggcacggaacgggttcaccacgttaatccagccgttgttccaacgtttcttataataaaagcgtgtgggcaggttgaccgaatactcgctttcgataagccttatctcctgcatgaagctctcgttttcgttattgaacacgtcatccatgaggttgtgtttcataagtcggctcatccacagacctcccatcagcaggcagacatagcccgcaccgacagtcagcacgtacagtcctgtcaccgcttcaaccggcagcggcaatgccaatatccaccagttgagaaagaacagcacgaatccgctggcaagtgccgtccagatccttgcccaagtgattttctcccctttgacaccctttgtccccagacaggacaggccgagcaaaaggacggcaaagagtttcgtgtagaggacggaatggaacagccctgccgtgcggttgaaattcatcagaatcctgtccaccacgccgatgtccattccccataaccgtatggtttcatagcagaaccaatacacgttcatgacaactaaaataatactcacggcacgcaaaaaatccatgattttcgccagtgccctcaaatcgtcttcttgtgacatacgttgatttttttttattgttgatactccgaattacatacctaagcccttgtgtcttttctttttcttcctgcgctgcatcgcccggatgaaggcttcctcctcggcatccgtcgctgccccttcgggggcgagcaagcccatgccgcccgccacgtcttcatggccggatgcgtcctgccggtgcacatcatccccggttcccaccggaatggaaaacggtataggcttctgtccggcgaaaggcaacgtgaaatgttcctgcaagaggtttgcggaaagttccttgcccatgcgcgagccattcagcacgcatcccgtgcggtggtcgatgaacgtggctccgtagatacgtccttcttccgtgtagcgtagcacggtgtcgatgcctttctccttgagccgtgaaacgaacttctccttgtcatacgtgccttccaacacgaaaaggacggcacgcttcgtcatgtcagcgagttttctctccttgatctccattttggaacgggcaaacttcttcttcacggcctcatagccgacggatttcccgaacagcgatgacttgaacgggttgcccgccttgttgcccgaatcgtccgtcgcggaatagaccagcccgtgatactcgcgtccgcgaacgttaccctgtgtttcctccaccgtcaggttgtacagggaaaggagtgcgcggtattcacccatcgtctggaagcggtactgcctgttcaggaccttgacggtgttgcccacctgtttcttcacatcaccggcagagacatccaccttatggggtggcgtgtcaagacggcggttcttgcgttcggcatcatgcagcccgtacttacattccagttcgcgggtgatctgcttgctccggtagaagttgttgcgggtgtcaatactcttgccgttttcgtccaccctgaccgtcacgatatgcaggtggtgacggctggtgtcctcatgcttgaaaacaaggtacggctggtctgcgaatcccatcttttccagatactcccgtgcgatgtcctgaagttccgtgtctgtcagcacatcgtccgggtgcggattcagcgagatatgcaccaccggtttctccactctcgtatgtcccggcatacaggcaagaaaaccctccatcgccttatggatgtccaccgtccccgtgccgtcattgtagatgcggttggtagtgagcagccgccctttcgcctcgttgatcttctctccgttgtagataagcgcaccgtacaacgattttcctacactgattttagcgaccatttcgcctccatttcccttgaaagttccacaatccggcggctcagtctcacgagttcgacggtctgcccttccagcctgtagagcaacgccatcgcctttttctcggaaaaatggcagcgcaattctttcacgatttggttgtagttcgtgcctatggcacggaactgcgcatggaaatcggacagcttggtgtagtaatccaccagcgtcttgtccactttctgcacgcggaaaggctgtccgaagaaatgcgctttcaggaaaaccgacttggcgtaaacgcccgatttctcgaacatggtaagaaaatggtcatgttcctccctgttgaaacggacggtgtagcggaacaccgccggatcatgtttgggatttctcccggtcttgttcttcttttcactcatatgaattttggatttaacggtctgacggcataagccgccgcttcaggtcacagacaccgcaggtttgaaaggcttcccgacttcggagaggaagccatccccccggagggcaaggtgttttctgggacgctcaaaacgttttgagcggctgaaaacataccttgctatgttctggagaacataaaaatccgccggggcggattgggagggacgcctttcagacctcgagccgcgccacttgtggcgaaccctgccgtccgggggcaaagttacgcccttaaaacggtatcggacagatacttgaaccggacaaagaacgccaaccggcgcaacatgctaccacttgccggagaagtgatacaagttccaaaatatacttgtttatttgcggagtaatccggatgtggaactgaaaaagcactcatttcaccggatgtccggacaataatccgaacagtgttccagacggttgaaaacgagtgtatgcatccaaacggattcccatgcctgcatttgtctggaaagattaaagcatggggaaacggatatgcagactgatgtccgcagacacaaccggattaacggacaagtaaataaacggacggggatgcgtgcgtatggataataatacgctgccgctaccggacagatgtgtaacttaataaatattcaatcaaatgaaagaagcgacttatgtggcaatctccacacaaaaaggaggagcgggtaaaacaaccctgacagtgcttgtggcaagctacctgcactatgtgaaaggctataatgtagccgtcgttgactgtgattttccacagtacagtatccacgacatgcggaggcgtgacttgaaagccgtcatggaggatgagcattacaagctgttggcgtttgaacagctcaaacgactgaagaaaaacccgtatgcgatcaagtgcagccgtgcggaggacgcgatcaaaacagccgaagagctgacggaaatgcagcctgatcttgatttcgtgtttttcgacctgccgggcacaatcaacaacgccgatgtggttcagaccattgccaagatggattacatcttcacgcctatcatcgctgaccgtgtggttatggaaagttccatcaagttcgctaccgtcatcaatgaacagatgataagtacgggcaagtccgacatcaaggggctttaccttgtatggaatatggtggacgggcgcgagaagaccgagctttacaaggcatacgacaaggcctgcgcagagttcgccttgtctattcttgaaacattcataccggacagcaagcgtttccgtaaggagacggctgtggaacgcaaagcggtattccgttccacagcgttccccgcagacaagacgttggttcgtggcagtaatcttgacaaactcgttgatgagattctcggtatcattaaaaactgaacgtcatggcaaagaaagcaagaatagaggacatcgacagtgatgccgtaatcaattcattccgcatgggtgatacgagcattccgccgcaggcaagaagcacggacgggaacatgacggaagcactgccggaaaaagatacactggcggccattaccctgtctgcatcccgttccaaggaggaacctgaacacgggtgcagggacggaaaggcgaagaaaacagattatgacggcacattcgtatgtgaagccaatatcaccgcaaggcttggtaagcaggtgtatatccgtaaggagtaccacgaccggatacagaagatacttcacataatcggcggcaacgaggtgacaatcgcaagttttcttgacaacgtgctgacacaccatttcacgctgtttcaggaggatatagcggagtcgttcaaacgtcacatgaaatcctatggcttataaacaatcaatcaacaacaagaacatcatgaaaagaaagatgaacaaccgtcagtcggacagactgcaaatcagtaagagcaagagtgagaaagccgcagcacaggcgtcacagtgtgtaaccgctatcctgaaagcatcggaaatcaaatcgcggcaatgtgtctacatcagtcgggaaacccatgagaaagttgccgtcgtcgtcaaccgtctgggtaacgggttaagcatcggcaagtttgtggacaacatcctcattgaccatttcagacgatacggagtacagtacacggaacagattgaaaacttaaaaaaagtaatgctatgacaaaagtgtttttaatcgtatcacttgcctgcaatgtatggttcctgttcatgctgcttcacgaccatatcatggaaacaagacttatacgcttcttcaaaaagatagtggaagtatggaaagcgcttggcgattcgacaaaaagagaggaagcagcaagaaaagaaccttccaatatggaaaacgacatcataggcaagagccgttttaagatggcttcaccccggacaaccaccgccataccgacgcaagaagctgccacttcggaaaaaggcattgagctgacggaggaagaggttacttttggcgatggaaacacgggagcaccctcttatccggcacaagttccggaagataagattgatgaagcctttatgagcatatctccttcggaactgaagtttggtgagaacgaaccggaagatgatgtcccggacaaggaacaggcttcgggaagcagtttcgaggacatcgacatggcagtccggaccatacggaaagactcaccgtccgatgaggaaatgcgacacgccggaaaggtcatgacggaacttgacgggactgaacttttttccagaataacggaaagcatgaccgatgaagcgatgagcggaagacttgcagaagcgatggctgtttttgtggatacggtgaacatgaccgtgacacggcaaaaagacaaaatattcgtgattcctgaaaaaatagaagagttcgacatccggaactatgtataatgaaaaaataaaaaaatgaaaacatgacaccgaaaggtgcggtacgggtggtacaaggtacagcctgtccgcaacggacagtcccaagtccgtggaaacaaacgggaatgccactaaaccaaagaaaagtaatcaagtaccaaccgtctgaaaaaggaccatccatcctttggaaggcacaaaacaagaacagtctatgaacaagtacatcagacagaaatccatcctttcagtagcgcttgccgttgccgtaacagtttccgcttttgcacagggaaacggactggcaggcattacggaagccaccacaatggtaagctcatatttcgagccggcaacgaaattgatttacgcggtaggtgccgtcatcgggcttatcggcggggtaaaagtgtattcaaagttttcatcgggagacccggacaccagcaaaacagccgcttcatggttcggggcctgcatcttcctgatcgtcgccgccaccatcctgcgttcattcttcctttaatagttacaggtatggctgaatacccgataaacaagggtatcggccgtccggtcgagttcaagggattgaaggcacagtacctcttcatcttctgcggaggtttgctggctctcttcatcctgttcgtcatcctctacatggtcggcatcgaccagtggatatgtatcggcttcggcgcggtatcgtcgtccgtcctcgtgtggaagaccttcgcgttgaatgcccgatacggtgaacacgggcttatgaaactgggagctgcgcgcaatcatccccgataccttgtcaaccggcggcggatcacccgattattcaaacgacaaagaaaggaggaaaggcaatgaggaacacatcgaaaatgacgacattggaaaacaagttcccgctgttggcggtggaacacggctgcatcatctccaaggacgccgacatcacggccgccttcgaggtggaactgccggagctgtacaccgtgacgggtacggaatatgaggcgatacacggctgctggtgcaaggcgatcaaggtattgccggacttctccatcgtccacaagcaggattggctcatcaaggaacggtatgcaccggagctgcaaagggaggacatgagctttctctcacgctcgttcgagcgtcacttcaacgagcgtccgtacctgaagcacacctgctatctctacctgaccaagacaacgaaggaacgtagccggatgcgtagcaatttcagcacgctgtgccggggcatatcatcccgaaggaactggacagggagacggccgggaagttcatggaagccacggaacagttcgagcgcatcatgaacgacagcgggtttgtcaggctgcgccgcctctccaccgatgagattgcggggacggacggcaaagccggactgatcgggcgttacttctcgctcatgtcagagaatgacggcaccttgcaggacatcagtctctcgacaagcgagatgcgcatcggtgacaaccgcctgtgcctgcacaccctttccgacgcggaagacctgcccggaatggtggctaccgacacccgttacgagaggctctccactgaccggagcgactgccgcctctctttcgcatccccggtggggctgttgctctcctgcaaccatgtctacaaccaatacgtgctgatagacaacagcgaggagaatttgcagaagttcgagaaatccgcgaggaacatgcagtcgctctcccgttattcaaggagcaacagcatcaaccgtgagtggatagaccagtatctgaacgaagcgcattccttcgggctgacctccgtgcgggcgcatttcaacgtcatggcgtggagcgacgatgcggaggaactgaagcatatcaagaatgacgtgggaagccagctggcaagcatggaatgcgtgccgcgccataacactgttgactgtccgacactctattgggcggcgatacccggcaatgcggcggacttcccggcggaagagagcttttacaccttcatcgaacaggcggtgtgccttttcactgaggagaccaactaccgcagttcgctctcacctttcggcatcaagatggtggacaggctcacgggaagaccgctgcatctcgatatttctgacctgccgatgaaaaaaggcatcaccacgaaccgcaacaagttcgtgctcggtccttcgggcagcggcaagtccttcttcatgaaccaccttgtaagacagtattgggaacagggaacgcacgtggtgctggtggatacgggaaattcctatcagggcttgtgcgagatgatacggcgcaagacgaacggggccgacggcgtgtatttcacctacacggaagagaagcccatcagcttcaatccgttctataccgacgactacgtgttcgacgtggagaagaaggacagcatcaagacgctgctgctgacgctatggaagtcggatgacgacaaggtgacgaagaccgagagcggggaactgggcagtgccgtgagtgcctacatcgaacgcatcaaggcggacaagagcatcgttccctcgttcaacaccttctacgagtacatgcgcgacgattaccgctgcgagctggcgcagcgtgacatcaaggtggaaaaggaggacttcaacatcgacaacatgctcaccaccatgcggcaatattaccggggcgggcgctatgacttcctgctcaattcggcggagaacatcgacttgctctccaagcggttcatagtcttcgaaattgacagtataaaagaaaatcgcgaactttttccgattgtgaccatcatcatcatggaagcctttatcaacaagatgagacggctgaaaggagtaaggaaacaactgatagtggaagaagcatggaaagccttatcatcggtaaatatggctgattatctgcgttatatgtataagaccgtcagaaagtattttggcgaggcgatcgtggtgacgcaggaagtggacgacatcatttcatcgcctattgtcaaggagagcatcatcaacaactcggactgcaagatactccttgaccagcggaaatacatgaacaagtttgaccagattcaggcgttgctcggactgacggagaaggaaaagtcccagatactctccatcaacatggcgaacaatccttcaagattgtataaagaagtttggatcggcttgggcggcacgctgtcggcggtctatgccacagaagtaagcgcggaagagtatgcggtgcgcccgtaaagggaatttgacgaatgtcgctttggcaagcgactgggcaagtgtttaaaatgcccattaacaaccgctaaccggaggggaaaaccccacaagggaacatagcacgttggtaaagccataagtcagccaactgtcaggctgcgaccgaatggcaagttaaaatgatagatatgaggataaagccagcattggttgaacgatagtccgagcagtcgtatccttgggcaatgacggaagacagttgaataattcttcggaattataccgttatgttgcggtactacactgatgacacgtagcaggagtagcataaacttaccgcaaggcaactaccataagtagtaaaggacgaaagtcgtatccgacaatctatcgagccaaatagtcgtcaaatttctaaacggggattgcctaaaccggaaagccagttgtagggctatggggtctgcccctgaatatccggcatggcaacggagcttccatagtagtctgagcagggtaacgccctgtacatggcgaaggggagcagctaattaagtttaacaatttaaaggaagatgtgagagacatgagaaatccagaaaatgtgttgaacagtctgagtaaacacagcggtaacttgaactataagtttgagcggctgtatagagtgctgtttaacgaggaaatgttttatgtagcctatcagaatatttacagcaagacaggcaacatgacggcaggagccgatggtaaaaccattgacggaatgagtattgaccgagttgaacaactgattggcagtcttaaaaatgagacttatcagcctaatccgtccaaaaggacgtacatacctaagaaaaacgggaaaaaacgtccgcttggcataccctcttttgatgataagctggtacaggaagtagtcagaatgatacttgaagcaatctatgaaggtagttttgaacatacttcacatgggtttcgtcccaaacgaagttgtcatactgctcttatagatatacaaaagacattcactgccgtgaaatggtttattgaaggcgatattaaaggattcttcgacaatatcaatcatgacgtactgattaatattcttcgggaacgtatcgccgacgagagatttttgcggcttatcagaaaattcctgaatgccggatatgtggaagactgggtatttcatagaacgtacagtggaactccgcaaggcgggattatcagcccaatactggctaacatctaccttgacaagttcgacaagtacatcaaggaatacatcaatcggttcaataaaggggtaacaagaaaaggcgacgctcgatacaagctctacgaacagcgaagataccgactggcaaagaaactaaagaatgagaaagatgtaaaggtaaggaaacagatgaccgccgaaattaagcggctacgagaagaacggaacaactatccggcacgtaatgaaatggacagcagtatcaaacggttaaaatacgtgagatacgcagatgactttctgattggaattaccggtaatcttgaagactgcaaaacagtaaaagaggatattaagaattatttgaatgaagctcttaaactggaactgtcagacgaaaagacactgataaccaatgcgcagaaaccagcgaaatttctcggatatgacgtatttatacgtaggtgtaacgatttacgtaaggataagtacggtaaaacggttcgtgcattcggacacaagcctgtattgtacctgaattttgaaacgatgcggaagaaactctttgattataaagccgcaagaatcgcggtcgtcaatggcaaagaggtttggaaatccatcgtcagaacgtacatgctgaacttggatgacttggaaatagtcagtcagttcaatgccgaaatccgagggttctataattactactcaatagccaataacagctatgtcatcaattctttctatcacattatgtcatacagcatgtataaggtatttgcgaacaaatacaaatcatctgtaaagaaaatacttctgaaatataaaaagaacaaggttttccaagtggcatatgaaaatagcaagggtaagacactttaccaatcattttatcatgatggtttcaaacgcaaaaaggttgcagggaatatttactgtgacactattccacggacagtttccataacaggtggacgtaacagccttatggaaaggctgaagctccaagtttgcgaattatgcggtgctaccgataaactcgaaatgcatcacgttcgcaaacttaaagacctgaaaggtaaatccgactgggaaaagaaaatgatagctcgaagacgaaaaactttggctgtctgctcaaagtgtcatgcaaaaatagaccccgaccgaagaatcagactgaattaattagtggagagccggatacagggagacttgtaagtccggttcggaggcgagtactcggaaacctaccatagaaatatgacaaggcgctgggtgcttagcctacgtctacactaccgaggaaactgagaaggtggaggtttaccgtctggcggagaaattgggcggtgacatcgaagccgccatccggcaactggccgaaaggcggagaaacaaaaagaattaaccaaccgattatcaatcaacaaaaaagaaaaaacgtatgagtatatcaagagtgaaaatgctgcaagtcagcaagtgtctgatcggactggcagtcatgatgctgcaatcctgcgacgtggcggaaagccgccgcgaccgggtgtgcggaaactgggaaagtgtggacggcaagcccgatgtgcttatctataaggaaggcgaagcatacaaggtgacggtgttccgccgcagcgggatgcgtcgcaagctgaaaccggaaacctatctcttacaggaggagaacagcaacctgttcatgaacaccggcttccgtatcgacgtgtcctacaatgaagccaccgacgtgctgaccttctcaccgggcggggactatgtacgtgcaaatcacgaaccggagaacccgatcgaagaataagaataccaaccgctaaatccaaagaaaatgaaaaaaggaacaacattagccgtatgccttagcctgcttttggctggcagtgcttccgcccagtgggtggtgagcgatccgggcaatctggcacagggcatcatcaacgcctcgaagaacatcgtccacacctcgaagaccgccacgaacatggtgaacaactttcaggaaacggtaaaaatctatgagcagggcaagaagtattacgacgcgctcaaatcggtgaacaacctcgtcaaggacgcccgcaaggtacagcagaccatcctgatggtaggcgacataacggacatctatgtgaacaatttccgaaagatgcttagcgacgggaacttcacgcccgaagagctgtccgcgatcgctttcggctacacaaggctgctggaggattcaaacgacgtgctgacggaattgaagaacgtggtgaacatcaccacgctctccatgacggacaaggagcgcatggacgtggtggaacgctgccattccaagatgaagcgttaccgcaacctcgtgagctactataccaacaagaacatcagcgtgagctacctgcgtgcgaagaagaaaaacgacctcgaccgcatcatgggactctacgggaacatgaacgaaagatactggtagcctatggaattcgacaaccttcatcagatcctgcgctcgctctatgacgagatgatgccgctgtgcggggacatggccggtgttgcgagaggcatcgccgggctgggcgctctgttttatgtcgcctatcgggtgtggcaatcgctggcaagagccgaggcgatagacttgttcccgatgctccgaccgttcgccgtcggcttgtgcatcatgttcttccctacagtgattctcggcacggtgaacagtatcctctcgcccgtcgtgcaaggtacagcgaaactgcttgaagcgcagacgctggacatgaacgagtaccgtgaacggaaggacaggctggaatacgaggcgatggtgcgcaatcccgaaaccgcccaccttgtctcgaacgaggagttcgacaggcagctggatgaactgggctggtcgcccattgacatggcgacaatgacatggatgtatatcgaacggggggcgtaccggatgaaaaaggacatacgcggcttctttcgggagatactggaactgacgttccaagccgccgccctcatgatagacactatccgcacgttcttcctcatagtgctggcgatactcggtccggtagccttcgcaatatcggtgtgggacggtttccaaagcacgctcacgcaatggttctgccgctacatacaggtctacctgtggcttcccgtgtcggacatattcagcgccatactcgccaagatccaggtgctgatgctgcaaagcgacatcgagcgcatgcaggccgacccgaacttctcgctggattcgagtgacggggtgtacatcgtgttcatgataatcggtatcgtcggctacttcaccattccgacggtatcgggctggatcatccaagccgggggcatgggtagctacgggcgcagtgtcacgcagcttgccggacgtggagccgcccttgcaggcggtcttgcaggtgcggcagccggaaacgtggccggacgtgtcggacgtgccgggataaatgcgggcaaggcggcatggaagcataccgccggacgccttctcaaacggaaataacctgtaaaatcaaacgcaatggaattcaagtctctaaaaaatatcgaaacgtcgttcaggcagatacgcctgttcggtatcgtattcctctcgctgtgcgccgtgataacggtatggagcgtatggagttcctaccgcttcgcggagcggcaacgggaaaagatctatgtgttggacaacggcaagtccctgatgctggcactctcgcaggacctctcgcagaaccgtcctgcggaagcgagggagcacgtgcgccgcttccacgagctgttcttcacgctctcgcccgaaaagagcgcgatcgaacacaacgtgaagcgtgccctgctgttggcggacaagagcgtgtaccactattattcggattttgccgagaaggggtactacaaccgcatcatcgccgggaacatcaaccaggtcgtgagggtggacagcgtggtatgcgacttcaacacctatccctaccgtgccgtgacctatgccacgcagaagatcatccggcagagcaatgtcaccgagcgcagcctcgtgaccacgtgccgcctcttgaactcgtcccgttcggatgacaacccgggcggtttcaccatcgaggagttcaccatcatcgaaaacaaggatttgcaaaccgtcaaacgctgagagtgccatgaatgggaaaattttcagggaaccgatgtggagcgtgtattggaagctccacgaccgaaggaaacaattggaggcaggactcaaggggtatctggacggcttgccgcagaagacacgccggcgcatcgtgctggtgatgcttgcggcttttgccgcactcgccttctactctttctgtaaagccgtccatgacatcggcaggggcggaaacaaaggaatggagacaggacatgccggacgggtggaactgcccgtccggcagaaaacggacaatcacttaataccttatttgtatggaacagacgaagaatgagacaaagattgaaaatgcggccaagcccgacaagaaaaagccggagaaggaacgtaaaccgctgaccgaagcgcaaaggctgcaacgtcagaaaatgatagtgttgcccgtcatggggctggtattcatcggggcgatgtggctgatatttgccccgtcctcagacaaggagcggaaaccgggtacggacggttacaacatagagatgcctgatgccgacaaggcgaaccggcagatcatcggtgacaaggcaaaagcctatgaacagatggcaatggaggaacggttggagagccgggaccatgccgtgcagcggttggacgatatgttcgaccgtgagacggcggataacggagacttcgacctcgccaatcccggcggaaaggaagagacggagaaaccggccgttcagaccatccgatcctccgctgccgcctaccgtgacctcaatgccacgctcggaaacttctatgaacagccgaaagaggacaatgccggaatggacggactgttggaacgtatcgccgcattggaggcggaactggaaagtgaaaaagaccgaaactccacgatagacgaacaggtggcactcatggagaagtcatacgaacttgcagccaagtacatgggcggtcaaagcggtacacggcatacgtcgggacatcccgtagagccgtccaccgttcggaaagccgggaagaacagggttgcgcccgtcagacaagtggagcgtcaggtggtctcctcgctcgggcagccgatgacgggtgcggagtttgccgccaccttcccgcaggaacgtaaccggaacttcaacacggcggtaggcggcacaaccgtatcggacaagaataccctgtcggcttgcgtccatggggcgcagagcgtgacggacgggcaggcggtcagactccgcctcttggaaccgatggcggtggcggagcggataataccacgcaatgcggtggtggtcggcactgccaggatacagggggaacggcttgaaatcgaaatcagctcgctggagcatgacggcacaatcatcccggtggaattggaggtctatgacacggacgggcagccgggcatcttcattccgaactcgctggaacttaatgccgtcaaggaagttgccgccaacatgggcagctcgctcggtagcagcatcaacatctccaccaatgcgggggcgcagctcgcctccgatttgggcaagggactgatacagggcacgagccagtacatagcggggaagatgcgcaccgtgaaagtgcatctgaaatccgggtacagggtcatgctctatcaggaaacgaactaaggcaatagccaatcatttttttatttaccactaaatccgaagtaataatgagaaaagaaatcatgatgtttaccctcgttatgggtatcgcaactgcgggtgcgcaggagaacgtaagtaatgaacggcaggcagccggacccaccttgacaaaggaggtctatccgcagaagaaaacggacggcgacctgtatcacggtctgacaagaaaacttggatttgaccgtatgataccgccccacggtctggaagtgacctatgacaagaccgtccacatcatcttccctgcggaaatacgctatgtggatttgggatcacccgacctgattgcgggcaaggcggacggggcggagaacgtgatccgtgtgaaggctgccgtaagggatttccccaatgagaccaatatgtccgtaatcacggaggacggaagtttctacacattcaacgtgaggtacgccgccgaaccgctgctgctcaacgtggagatgtgcgacttcatccacgatggggaggcggtgaaccgtccgaacaacgcgcaggaaatctatctgaaggaactgggcagtgaaagcccgatgttggtgcgccttatcatgaagtccatccacaagcaggacaagcgtgaggtgaagcatatcggctgcaagcgtttcggcatacagtacctcttgaaaggcatctacacgcacaacgagcttctgtatttccacaccgaaatcaggaaccggagcaatgtgccctttgacgtggactacatcacgtggaaaatcgtggacaagaaggtggcgaagcgtaccgcagtgcaggaacggattatcctgccgctgcgtgcgcagaactacgtcacactcgtatcgggaaagaagagcgaacgcacggtcttcgcgatggagaagtttaccattcccgacgacaagtgccttgtggtggaactcaacgagaagaacggcggtcgtcaccagtccttcgtgattgagaacgaggacttggtacgtgcaaatacaatcaacgagcttcaaatacgatagccatgagagcgttcatcatcacaatggtagcgtcgcttgcccttttcacggggcaggcgaacgcccagcgatgcctgccgaatatgcagggtatcgaggtaagggcgaacgtggcggacggggtcaagcccggcggcaataacggagggtacagtttcggggcggctctttcctcttacacgaagaaaggcggcaaatgggtattcggaggtgaatacctgctgaagaacaatccgtacaaggagacgggaatccccgttgcgcagttcactgccgaaggcggttactattcaaagattctgtccgacgcccgtaaaatcgtgttcgtctatgcgggggcttcggctcttgccggatatgaatcggtaaattgggggaagaatgtgctctatgacggtgcgacgttgcatgacagggatgccttcatctatggcggtgcattgacactcgatgtggagttttacgtggctgaccgcatcgcgctgctcgccaacctccgggagcgttgtatgtggggtggcgacacccggaagctccattgtcaatggggcgtgggtgtcaagttcattatcaactgacacgctacatggaacggacggatatagacgccatgagacggattccgcttgtggactttctcacacggttgggacatgggcccgtgcaaagaagcggcaacgaactatggtatcgtgcgccataccgcaatgagcgcacgccctcttttcgtgtgaacgtggcaaaacaactttggtacgacttcggtttgggcaagggtggcgacatctttacccttgccggagagttcctgcaaagtgatgacttcatggagcaggcaaagttcatagcggaaactgttcgtgtaccgtttgcaatggtggaaaagccgcagttcctgccggagccgtccgaacctgtctttgagggagtggaagccgttccattactccgttcaccgctgacggagtatctggcggaacggggtatcccttatgccattgcatcacgctactgctgccgtttgaactatggcgtacgtggaaaacggtattttgccgtcggttttctgaacatgtccggtggttatgaggttcgcggccgctacttcaaaggctgcgtgccaccgaaggatgtgtcgccggttaaaacgggaaacaccacctctgacgtgtgcagcgtgttcgagggtttcatggactttctgtcagccgtcacgctcggattggatacgggtgactgccttgtgctgaactccgtcgccaacatggataaggcggtgaaatatctggacggatacgggcgcatcgactgcttccttgaccgtgacaaagccgggcagatagtgctggaagccctcaaaagacactacggcggacgtgtctgtgaccgttccgccctctatgacggttgcaaggacttgaacgagtatctgcaactgacaacagaaaaagaaatatcaatcatctaaaaatcaaaatgcaatgaatatacagaacaacaaggacaagggaatgtcaatcttcaaggcattggcgttctgcctgtttgctgccatgtcatttacgctcgcatcgtgtgacgaggacatggatattcagcaatcctatccctttacggtggaaacgatgcccgtgccgaacaaggtgacaaaggggcagacggtggaaatacgctgtgagctgaaaaaggagggcgacttcattgggacttcgtacacgatacggtatttccagttcgagggtgaaggctcgctgaaaatggataatggaatagtgtttttgcccaatgaccgctatccgcttgaaaacgacactttccggttgtactacacggcgacgtgtgacgaggcacacaattttatcgtggtggtggaggacagctttaataattcttataaattggaatttgattttaataatcggaatgtagcggaaaaggcaaaaagtcagaccgtcatttctactgataccccaaaaccaatgctaagatgatgcgtgtgttcatggttatcctctgttcgctttggacggtctgtgccgtatccgcacaggacagccatcataaggatacggatgtgccggctgcaatataccggctgccacttatagagagggcatttctgtgttgtcgctactttgagggatggcactcggaaaagagctacccttacgtcggatggggtcatagattacaagagggtgaaagctactcggcacacaccatgacgaagcggcaggcggatgcgctcctgcggaaagacttacggaagtttatagctatgttccggcagtttggggtggattcaaccctgcttggcacacttgcctacaatgtcggtccataccggcttttggggagcggaaagatacccaaaagcacgctgatccgaaaattggagtcgggcgacaggaatatttaccgggagtatatcgctttttgtaactacaagggtaagcgtcacaccatgctgctcaaacggagaaaggcggagtttacgctgctatatgtaccataaaaaaacactcgtccctttcaattctaagtaagggacgagtgtaaatgtactgtaatttggctatttgcttataaatgactatctttgcacaaattttacatcatcccataaaatgaataaaggctctgaatggcgaatttgggatttgcatgttcatactccattttcgcttgaacataattataaatataatcccgaagaagatgtttgggagaaatatattaatgcattagaacatctccccggtgatataaaggttcttggcattaatgactatctttttattgatgggtatcgtaaggtactggagtatcaagctcaaggaagattgcaaaacattgatttgattttgcctgtcgttgaatttagattggctaagttctgtggtaatgaaaaatttaaaaggataaactatcatattatattctccaatgaactaactccagaccagattcaacaacaattccttaatgctctgactgcccattatactttaagtcctgattgtaatcaacaatggggtggtattgttacaagagaaagtttagaagaattaggtcgtaaaatcataaattcagtaccagaagaaaaacggaatcaatactcatctcctttaaaagagggatttaataacttgaatcttgaacttcctgtgataatgagtccattaaacaatgctaatcatatttttaatggtaagtttattactgcaataggaaaaactgaatgggatgattttaaatgggatgacaattccattgccgagaaaaaaagtataatcaatgaagcagacatcgtttttacagctgcacaagatattgataaatacaacaaatccaagagaaaattgcacgagcaaaaagttaatgagttactattggattgtagtgatgcacatagtttctctgatgataatgcggttaaagacagattaggaaattgtaaaacatggataaaagcagataccacatttgaagggttaaaacagatattgtttgaaccggatgatcgggttcgtgttcaatcaacaaagcctgatgaaaaaaatatatatcaagttatagatagtgtaaccttagatgaagaaggtttttggcatggaactattttgctaaatccaaatctaaataccattgtgggagggcgttctactggtaaatcttcattacttaaagctattgctgcaaaacatgggaataaagaagttgataaagatgatttcataagacaacatttggatggtattactatccgctggcaagatggaaatgatcaacttggtcgtgagattgaatatttccgtcaaagctatatgcatgatattgctttcgattctgataagacaaatcaaatcgtggagaacataatacaatctaaagatgaaacatgcttattgaaagaatattatgaacgtttaacaaaattctctaagactatttcagaaggagtattttcggtttttcaaatgcaaaaagaaataaactttttaagaaaatcgctatctgaaaaaggaaagagagaaggagtcaatcagcaattaagtttattaaaagcaaaagtggcagatttacataaagatgcagaactaactcctgaagagcggttgtcattagatgcctatataaagcaaattcaagaaaaaaagaaactaattgcagatgcagaacgggacttgttaatatttgaaaaaatattagtatcaactccctttgatgctttatatgaagaaagatgtcaatttgggagtatgtcgttcggtttaaatcaagctgatacttatagattatttaatgacttaaaaattaagactgaatcagagtggaataaaataattaatcaacttaaaaataacactataaaagcaaaagaacaattagcatctgaaatacaaacaatcaccaactcggagatttataaaaagggtatccgcatatttgagggtaataaagaactgaaagatttaaatactaaaattcaagaagaagaaaagactctcgccgttattgatgaaatgcagagtaaacttgataaaatcatacaacaacaaaatagctcgattatacatattattaatactcattgttcctttaagaaaagtgcaaaacaagtctctgaatcacttttaatttcatatgacggtcttgacattcatataaatattaattttcataagaaagatttgcaggatttcttggaaaacaggcttaatcaaagaggttatgagcgacaaggatatttacaagaattactgaataattatgatgataataatgaaagcaatagtagctctttttttaaggacttgctaacaggagatgtcttacttaaaaatggatatgatgcacaaaatgttgccgtagaatttttatcacggaattggtacagtcttaattatggcataacatatcaagctgatacttttgcaaatatgtcagaaggaaaacaagcttttgtaattttgaaattacttttggattttagcgacaaaaagtgtccgatacttatagatcaaccagaagatagcttagataatcgcgctatatataatgaattggtagcatatatcaaacgcaaaaagcgagagcgtcagataatactcgtaacacacaattccaatgttgtggttagtgctgacgctgaaaatgtaattgttgctaatcaaaatggcactgatactcccaattggggtggttttaaatttcaatacattcatggagcattagagaatacaaaaagtaaagatgaagcagattcacaaatattatcttcacaaggaatacgagaacatatttgtgacattttggaaggtggacgagaagcttttgaaaagcgtgaacaaaagtatggatttagaaggtgatataatccaaatatacgcataatccgatgaagccgcaacttcatcggattttccgcttttcatacattcgggattatccctttgccgattacctcaccgtccctgcaatgctcgatgatgccgggagaaaatcccatgtccccgattgcgatataccggatataatccgcatactcctgaccttgaaaattcctgtccgtgaggttcttgaaaatcatccttatgcttgttccgtcatcgctgtgcaggatgattttccgttctgtctgattgcttccatgattaaaactttgtttttgtaaatattatcggagattggacaaggtttctttgcctactttcttacccgccatcatgctcatgaaagaaagtaggcggcttttgccgcctgcctctcaaaatcgggtgtaaagtcccgttaccatcgtgaacatttcttccagcatatcgcaatagataccttcgtgcgtggctatgtccttcgtcttgcactcgaatgtctttttgctgaacgttttgcggtagaaacgcatattgtagaggtctaaacctgcgtcatagatgatgtcaaggcggtttgcacttgtcttgttcctcgcaaggctcatgcgcagtccgttccccatgtctatgaagtccttgcttcccgtcatggcggcaaaacgtctgccgcctatctgctctaaaatagtctttgctatcatattcgttgtcttttaggtgttatgttggggcgatgcggacatcgccccaacgttcaaaattctactttctcggttatgggtgtgcatctttccagccactctttcagacattccatgttatactcactcgttatgactgccgtatggctgtcaatggcggtgaaacggctgctttcatagctatctatccacccctttagagtatcaactccccatgcttcggcatcgtcaaacatgccgtccaatgccgtgataggctcgctgaatttgactatcagcgtttggtaggctgcttcgttcatcgcttgtcctcctttcctttctttgcagtcagccacttgtcccgtgcggctcggcactcattcaaagtaagttttacacaagagaacaattccccgtccgtgtggcggtaatcatattgcacaagtatgcgcttacgtctgccaaatcccgattggaatttctcgtacttctccgtacctgcttccgtgcaggtactcactccgttgatggtcatttttgtactcataattgtttattttttaatgaatctttccaaatgtttctcacgtatgccaagtgcttcggcatagatactcagttgggctgcatagcgggtgaggtaatagctcctctccatttcgtttcgggataatccgatattcacccttatatcgttcaagtgtctcttgacgatatgcttgtaataaagatactttcttttcctgtccatagtcgtatcgtttatctgttagaaatgtacagacagcaccctgtttctcatcaccatttcgggattgctcgtatagcgttgatgcaggtagaaatgatgagagccgaatccgtaacagaagaacttgtcaagttcgttcttctcggcaaaagacttcacacttttcctcaactgttcctcgttctccgccaaagtgaggagattcacaaattcaagaagcattgtgggaatcttgtcatcccacaagcaaaccatgctttcaattgtcactttcatatcttcatcgtttataaggttgatattatgccacttccatccgtttgcggataaggttcgcattaccgttcacaaggtcgatgatgcggtcgtgatactcggtgtcgctgttgcagaccccacgactttggactacctcgaatgttttcaaggatacttctaccgtttcaatgcgtttgccgtttatggtggctgacaggataagggagtttttccgattatggtaatcgcctacgcagtggtgcataagccgtccttcctccatcatctcttccacgctttcaatgaccttgacactgataaggttgtcggaaaagacaagcccgaagaagatacctttggctttcagatacttcttctcgtcctcaatcgtcttttgtcgtttttgttccctccgttcacgttccatttgcaggttacgtcttttcatcagcctgtcatgttcggctttgaggtcagtggggcaaacgtatttcgggctgttcgtatcctttccgaaatgccgtaggaggtctatggtatccttccacatggagcagtcggatatgttgtaaccgttacggatgcatatcttgatggatgcccaatatttttccacgtcgaaaaaactgtgtatgtaatatcgcaacatgtgatactgccctgttttcagcagtgtctcggctcgtctgtcggaaagtatggacttgaaaaggtcatagggacgcatgtggtgataatcgcctttgaaaccgttgcgtttcagttcgggaatgaaacgctgtcggggataggtacaggcaggggctatgtcgtatgcatgaagtcccccgtttgggcgtatctccatgtcgctgtctttcatccacaggtcgtaataaaacattgacatgccacgcagtcgggcaatggtcgttgccgtgccattgggagctatccacctctgtaccacttcaaagacggaatattcggctgcctgtcccgccttgtatcgggacttgacgaagaagaaacgtatcacttggtattgtttgcaggtggtgatgatggagaaatactcgttttctctgaagacgcttttccgtgtgcgcaacggttccaaccgtatgccgcagtggggacaggtgcatccgcacagggtgtccgcaaggtcgtggtcgctcttccacgaatgtccgcactcggtgcagatgtttgtgccgtccgctctcttgatggcgtaatggtcaaagcaatggcggaaagcgtatgccttttgtgtggcggtcaattttgaaagtcgcttgctcaatcgtgcgacttccttttgtatgggtgttctcggtttcataatcagaaattgaataagctgggttgtacttcttgtttggtcgctttggtggcgcatctcggcttgttgcgttcctgcaacttgcggagttcctcttcttggtatctgcggactgcctcctgtcgtgcttccgccttttcctctgccgtgagttccaccacgtggttcactgccacatggcagtctatcggattgcccacctctatctcgtcctcgtcatagtagtgtacggcttgtccgtatatttcaccgtctgaaaatccgttgcaaccgctgttcttcacatagttcagaatgtaggtgacgcaatcgtctatgttcttggctgggttgcggtagctcctcgcgaagagtgtatcttcctccgcacgttgttccaaatacatctgtatcgtcctcttgaaatgttctgttcctttcatgtcattgaatttttgatgggttgtcattcagataaagtatgtcacaatcttccacttcggcaggaagtccgaaaagcggactgtgtgagaagtacgactgtgcgtttccctcctcgtctgtgacgggtgatacaatttgtacctgccaattatccatccacttgtccgccatgcggatttcatcgtccgtcaatcccgtcgcatccccgtttatgaggtagcacaaactccatgtgggtatcttttccgttgcagtgttcatatcgctgtcgttttaaatgttaaatggtttgcttgataatctcaatcaggtattgcggattgacctcgtagaaaatgaaatctatgaagtctttccgtgtctccttgttcagttcacggtacaattcacggaatgaatcgaaattgccgttgagatagacctcaaccaaatattcaaagaagttgtccacttcgtaatgtctgcactgctgtgctgccgtcttgctgtttctctttgccatatcggtaggaattaaagggtgaataaccaaaggatgaagccgaagaaagcgatggtgaaaaggatagccacgattacgcctatcgccactcggaacactccgtttacaatctccatgatgatgtccaaaaggatgcccaacatcccgaaagcagtgctcacaattaagccgcatattgcaaaccctgcccattgcgccatttgtctgaattttgctgttgctgccatatccgatttatttgtaaagttccacaatgcggtaaattctgccgtacaaaatcttgcgtaatgccgtcttgtcggttgccttgtattccgaccattgcccgtactggttcacaagaaacgttcggagtacatcggaaaagtcaaaccgccatcccaataggggtactgcgcttttgaaataggcgttgttgttcactgcatgggtaagccaatctttttcttcccgattcagcttttccccattgttcagtttggaacgaagtccgtagaccttgctgccttgcaggttttccaatgtagggacttcccatgccacgaattttgttgctgtcattgcttccatatcttcgttgttttgattttttttgttttttaatgcggattcaagagctgagggagttgagtttcaaactatcttatctgcctctcgtttatccgacattttttttaatgcgtctttctgtcgcatcggtcgttttcgtttcgggtgctttaaaaggtagggattagggaatgcaaggttttatggggaaaatactacccggagggctggagatttctcccataaacaggaggcttgaccttgctttcccgtccaatcccggaattacctttgcgcccagaacgaaaatgacaacctgatgcggcctacagaaaggcgcttaaaatggaggtaaacgcacctggaggcagattagacagtgtaaacttgggaaagagaaatctgtatgaaaaagaaatctctgaaagggtaagtgatacgaccggaagcgtgaaaccgggcaaacttccgcttccggcagaaaggaacagcgaaacaggaattactaataaaaagcatcttctggcataagcgcaaaagaaatgggctttgcttcatcagactaaacttatgtttaggcgtgaggcaaagcccttttctctatgcttatgcggcaagtcgggatacgttcgttcaaaaactgttttgagcgatggtgtcccgatggataaaaactattgagaaaaaatctcgcggaagaagaaaaaatcaatgtgtaaatttcatgtatcccgtttttattattacttttgcatacgaagagttctttgaaggttacgcaacgcgtagaagtataatgcagtagataactaactaattcgtaacctattactaccatgagctataatccaatgctcatttccaataaattacatcaatttcataactttcttttgcaaagataaaggataaaaagaatcccgtccccatttctggaaacaggattcttgggtttagagtaggttttattaatcgaatagatcaacaatttgatccatttgtttagcaatactttcatccaccagttttgcatagtgagcggtcatacgggtatttgtgtgtcctaacatcttagaaacaacttccaaagaaatgttatttgccagagttactgtacttgcaaaggtatgacggcttgtgtgataggttatccgtttgttgatattacaaagtattgcaatgtctttcagatacttatttatatctgctggatcttggataggtaatagtttgtcaccacctttgtatttttctaagatcatttttgccattggtaataatgggattctggaaagaacacctgttttgatccttcgtttcttaatccaaattcttccattctgatctttttcaaaatgtgcggtggtgagagttttcacatctatgtaactcaatccagtgaaacagccaaacaaaaacatatctctggctttttccaatcggggtaaaggggtatcgaaattgataattctcctgagttcttcttcgtccaaaaagtcaatttcaactgcttctcgttccactttgtatgtggcaaagggattgaaagatatgtacgaatttgcaacagccagattgattatcttctttagtagcttcaaatgttttgtagatgagttttggcacatgcccttatctatcctcaaaaatgaatgaaacgactgtatgaagtttaaattgagttcacgcaaatacatatcttctcttttgtatttctgttgtatgaactctttgagtaatcttacagtatattcagaaatccaataagtagccttagaaactccgttaccaattaatttttcttgttcgtgattatgttctgtaaagacctcaaacaaacttttctctttcagagattcgatcttttcttgatatgcctcacatagaagtttagcagtgatgataaaacctctacccaacaattccgcttctttctgatacagtttggcttttacggctttcaggtagttgttgaggcttttggcttcctcatctttaccttttacttgttgtttggttttatcccatttatcaatatgaacctgtttccctgtcgaaaaggaacatttttcaccattgatagtaattatgacttcaataggagcattcccatttttccgaactttactttctcttatgaagaagagaatagaaaatgaacttctaaccatctgtttaataaattaaattagacattttagaagctctttgattttgattatattattgtaaatcagattattggttgataatttgtgaccagtttcttgaaaatgcagaaatggtcacaaattggtcacaaaatactttcaaattcattattttttaggagagaaatctcttgtcttgttttcttttaaaaatgaaaaatcatgagtgtttttatgtatcctatataccaatcccaatgctttacagataagatttgttgtttaaagaagtatttgattgggcaagaaagaagaagcatataagatatttcaataaacaaaaaaactcccgtaaccataacgattacaggagtttatatatttagaaataacttaaattacttcttcatagcttcctcaatagcaacagctacagcaaccgtagcacctaccatcgggttgttacccatacccaggaatcccatcatctcaacgtgagcaggtacggatgaagaaccagcgaactgagcgtcaccgtgcatacggcccattgtgtcggtcataccataagaagcaggaccggctgccatattatccgggtgcagggtacggcctgtaccaccacctgaagctacagagaaatacgggtgaccgttttccatacattctttcttgtaagtacctgcaaccgggtgctggaaacgagtcgggttagttgagttacctgtgatagacacgtcaacaccttctttacgcatgatggcaacaccttcgcgaacgtcgtcagcaccgtagcacttaacttttgcacgcagaccgtttgagtatgctttttcttcgattacgtttacttcaccagtcatatagtcgaactgagtttgaacgtaagtgaagccgttgatacgggaaatgattttagcagcatccttacctaggccgttcaaaataacacgcaacggttctttacgaactttgtttgccatttcagcgatcttgatagcaccttcggctgctgcgaaagattcgtgaccagccaggaatgcgaaacattttgtttcttcacgaagcaaacgagctgccaggttaccatggccgataccaactttacgatcgtcggcaacagaaccggcgatacagaatgcctgcagaccgataccgatagcttcagcagcttcggcagcgttggtgcagcccttcttgattgcgattgcagcacctacaacgtaagcccagcaagcattttcgaaacagataggttgtgtttccttacacattgtataagggtcgatacctttagcgtcgcagatagcctttgcatcttcgataccgttgataccatattcttttaaaaccgcgttgatatgatcgatacggcggtcataactttcaaataaagccatattattttttacttttttaaattcttatttaccagaaataaagatatcagaaaattgaaaacaagtacaccgccgcagcaggccacataaaaagccatccagggacggtccggcttaatcacgaagtaagcgataaccgttgccactgtggtgatagcgatcagcccgagaaggacgcgtgtcagtgtcttcttattcattacgaggatcgatatattttacagcttctttgaaacgaccgtaagagcctttggctttttccagtgcttcgttagcatccatacccttcttcaccatatccatgaatttacctaagtggataaattcataaccgattacttcatcgtcagcatcgagagccatacgagtacagtaaccttctgccatttccaagtaacgaggaccttttgccaatgtaccgaacatggttcctacttggctgcgcagacctttacccaagtcttccagaccggcaccgacaggcagaccaccttcagagaaagcagactgtgtacgaccgtaaacgatctgcaggaacaattcgcgcattgcagtgttgatagcgtcacaaacaaggtcagtgttcaatgcttccaacagtgttttgcccggcaggatttctgaagccatagcagcagagtgagtcattccggagcaaccgatagtttctacaagtgcttcctggataattccttctttaacgttcagagtcagcttacatccaccctgtttcggtgcacaccaaccgataccgtgtgtcaaaccagaaatatcagaaatctgagttgctctaacccactttccttcttcaggaatcggagcacactggtggttagctcccttctttacaacacacatgtgttgaacttcatgtgaataaatcataatcgctaatttattatattaaagtgataataaaactttatgctaattttaatgtaagatcgcttttaaaagaccgcacaaagataaaatttaaaattcagccgtgcaacaggaccggttatttcaaaacttctttaattttatcttccaactcctgaccgtgcaggttcttggcgatgattgtaccgtctttgtcaaccagtacggtatgagggatgctgttgacaccataaagagcggcaccgctgttctgccaacctttcaagtcggacagttgtgtccaggtgatgtttaggtcttttacgcctttggcccacgcatcggctttgctgtccaacgagataccgacaatatcgaatcctttgtccttgtaatctttgtaggctttgaccagattcggcatttctgcacggcagggaggacaccaggatgcccaaaaatcaatcaggacgactttgccgttaccgacgtattcggaaagtttgtgcacctcacctttagcgttcggcatttcgaaatcagtaaacttctgtcctatggctacctttttcaaaacattcagatgatcgatcatatagctgattcccggaacggacttgaaagaagaatctgctttggagatgatttcattttgcttctcttcgtcgatgttgtaacggaaatcgtagaggttcttggcggcagactgtttatctgtatgagccaggatgtagttgacaacggtttccgtaatcttacggtcgatctcttcatatttggcttccgcctgttttatcaggttttcatcgcccgacttcatatcggcgaccaatttgtctataccagagcgtaagtctttgattttggcctgcaattctttttgtgcgtcattttcgggagtaccgctaacagtggaagtagaatccagcacgactgctaattttccgttttcaagtacgaatgttgccatgaacggagcgttttctccgggagcgacacgcaccggttcaaccacttcttccgaaaaacggagagtacggagggcaggagcgttttgtgtgcctttcaaagcaaaagatccgttttgtactaaggcactgtccaatggtgcagcatcttttaccccatattcatagagatatacatacttaccattcaaatcactgtttgaaacggtaccggtaatttcgtaacccggtttttcgctacaagctgcaagaagcaggacggaagcggcgataggaagatactttttcatatatttatgtattaaaacgattaatactttattagttacagacgtttggcgcaaaagtaagaaaaaattgacacattatttgctatatttgtggcctaataattgttattatgaatttatcctatatagataccagatatgcggcgttttttcgttttgtaagggctgttattgtctgtttgttccttttttcttgtccggtgtctgcggggatttccctgcatatggcaaataatatagatttgtcaaataatgctatccttgacatgtatcaggatgagaacggttatatgtggatcggtacctacgacggtttgaatctgtataacggcaagaatacatatgtatttcgctttgaaccgaataacaagaataccttatgcagtaatatcatcaataaaatcgtgtatggtggggatggatttctgtgggtatcgacttctatgggattgaatcggttctcgttgaaagaccggaaggtgacggagtcctacacggaatatcccgaatgtttgaatgtggtgtctgattcggctggtaatacactgctcataaagcaaaaagattttatctcctgctattctcccgaaaccggctcttttcaggatgtacatgtacagggaatgaatgaagaagtatccaaagtcttgtttgcaaacggagaaaggcaattctttattcttgacgccgatggctgcctgcttgagatttgtccggattttgagtcttttcccttggtattggacataaagaaaactccgattcatgaaaaggaaattgaccgtgcttattacctcgatggcactttgtattatgtggatatggaaaaccacttttattcttaccggatgaaagatcgcaggaaagagtatctggccgaccttaccggctggatggagcaatatggaaagctttcccgtatcgctttgtttcattccgtcccctacttggttttcaggaacgggcttttgctaaacatcgataatcaggaagaggcattgaggtttaatgtcgggctattttgtgttttacctgaccggaagcaggatatcctatgggtggggacggacgggcagggagtccggatgtattatgacaagtataaccgattttcagggattcaactcaagagtttgccgattgtcgtgcggaatccggtccgttcgatctataccgaggatgagaaaacaatttggtttggaactaaaggaaatggttttgtgcgtgtggaagattatgattcctatgaaaaaggaaaaataccagccgagaaagtcaaacacttcacaacatcgagcggcttgtctagtgatcgtgtctattgtttccgtaaaagtaactattatccctgggtgtggatcgggacagaaggaccggggttgtcatattattccttagtggacaagaaagtccatacgatggcaagtcttgttgatacaaagatcagatatgtccatgccatccgtgaagtgaatgattcgacgttatggatggcaacgaccggagatggtttgctggaagttgttattggtagaaaagggggggagcttgtgattaaatatgtaaagtcttttatccttgaaaaggatggaaagatttgtaatgagttccattctatgagttatgatgatgaggcttctcttctttatttagggagccgtgggggatatggattggttcgttttaatctgttgactaagaaatacgaatttattccgatgaataatgccggtaaccgggcggtaggggatgtgctttgtatgtgttatagcaaggattctactttttatctgggggcgagttctggtatgacacagatgaaattacattctgggaacccggcggaagtacgccaatatagcaggatcgacggtatcaagaatgatatggttcacggtattctggaagattctgacggctgtgtttggctgagtacgaataagggacttaccaaatataatcctcacaatcgtttttttcataattatgaaagtcctgatctggatgtgacggaattctcggatgatgcttattggaagtgcccttacacgggaaaactgttcttcggtgggattaacggggtgatatgggtagatccgcaaaacgaccggcaggagaattataagccggccttacatttttttgaaatgaagatggggcatgaaacgcatagtttgtatgactatacggatcagaaaaccggatatgtgaccattccccccaacatatccacattttcgatttcttttgtggcgaccgactatatacacggggaaaactatgagtattcgtacttattggaaaactataatacatcatggaccgaactgcagaaagataacgaggttgtttttacgaagttaccttatggcaattatgttttgaaagtccgttacaagaatgatgtgttcgattcggatgccaaggagtattttttgcatatacgggtgttgcctccctggtatcgcggttcttgggccatgattgcctatggtttggtactggtgaccatatgtttgggtatcgtgtattggctgcgccgccggattgtggaaaaacaggccgaagtcgcccggaaaatcagagaagagcaaaaagaaaaactatatgaagcgaagttgaatttctttgccaacatcacgcatgagctttgtacgcctttgactttgattaatggcgtaaatgattatatcaagatatccgctgaccgattggctgatgggaaattggagaagtatgcccgtatcctgggtgagaatgtcacaaatctgaatgagttgatccaggaaattttggatatcagaaagatcgaggaggtcggattcagtcatatacagatcaaacgggtgtccgtaagcagtttgatccggaagcaatgcgaatcgtttatacctgttgcggagcagaacgggatcaattttaccttcagtgatgttgataaaccggtttattggaatacggatgtacccagtttgaaaaagattatacgcaatttggtgtcgaatgcattcaagtacacggaacagaaaggtacgattgatgtttctgtccggatagaaaatgagtctctgataataaaggtatataatacgggtaaggggatagcggaagctgacttgaaaacgatttttgatcgttttcatatcttaggagatttggatggaaataattatactcagatgacttccagaaacggattaggacttttcatctgccatagtatggttcagttgcttcgtggtgagataaatgtggaaagcaaggagggggaatttgccggatttatcgttacgttgccttatctggaggtcgaggaaatggatttagacgaacaagccgatgaagaggttccggttgcacaaccagtggtttcggcagccactgccgaaaccactgggaatatcggtaatccggttatcttggtggttgatgataaccgggatatcgtttggctgattaaggaaactttatcgtccgaatatgccgttcgggaggcatttaatgcagaagaggctttggccttgatggaccagcaaactcctgatttgattattacggatatcatgatgccgagtatggatgggtttgcgttgatcagccgtatcaagtctgataagttcacccggcatatacctttaatcgtagtatcggcaaaagtctcggaaagcgaacaggcggaaggattggatctgggtgccgatgtatacctgaccaagccattctcatccgtagtgctccattccgttgtgaacagattgatggcgaataaaaaagaactgaaagactattattattctccggaaagcgcttatgagcagtccggcggccagttgatccatcaggaagataaggagtttatggattccgtgacagctataattaaggaaaaccttgctcaggatacgttgcgtcctgaacttatagccgacaaattaggcatgaatacccgtgctttgtatcgccgttttaaaaaaatttcaccgttgacaccgagtgattttatcaaggactaccgcatgatgcatgctgcccggcttttagtcacgacgaacctgagtgtgcaagaaatcatctatcaggtcggaatctccaacaagtcctatttttatcgtgagttttcagccaaatacggagttacaccgggagagtatcgacggatgcaatagggcgtttccaaatgtaactgatttttattcgtagtctttaattcggtttatccgatataattggataaagcagacaataacccctttttggtcatatttctatttctgttgaaatatcggttcgtcttgaattgtcgtttttcttgtctttccgattttggagtgtcattacatgtcaagtgtttggcgtgtcatttggatgcaggggttgatctgtcgacagactttacaaatgcgaaataatcttttattgttttttgtgtagtgtcctgattgtacaaaagagtgtcataatcggtcataggttgaatatgatactctttttgctgccctgtgttactgtaattgtgttaagatcggctaatattgtcattgaattacaaaaaataaaattaaaaaatatagattggaagatagtcctttcaattttctgaattttaatgtgttcatgttaaattaaaagcaaaaaaatgatgaatgaatctaagctattatccccaaatgggatagtgaaggcctcagccttatgcttattaatgtctgctttttctgttaatgccgcatttgctgttccggtattggatcgtgaagtgatggttatacaacaaggtcggactttgacgggtactgtggtcgataattttggagaccctgttattggtgccaatgtgatcgtcaaaggaacaacgatcggtaacattaccgatgtgaacggtacatttactgttgaaaatgtaccggatgatgctgtattgcaaatctcttatatcggttttaagacattggaagtgccggtaaaaggtcagacaacctttaatattacattgcaagaagacactgagaacttgcaggaagtagtggtggtcggttatggttcttctgtgaagaaggatttgactacggcagttacgagtgtaagtagcaaagattttttggctggtgccgtgaatgatccgatgcagatggtggatggaaaagtagccggagtcgtggttaatagtgttgccgctgctgacccgaataagagtggtagtattcaagtgcgtggagcttcttctttgaaggctggtaacagtccgttgattgtgattgatggtatgccgggaggagatttgcgtaatttggcacagtcggatatcgagtctattaccgtattgaaagatggttctgccgcagctatctatggttctcgtggtgcaaatggtgtaatcttagtaacgaccaaacagggaaaggcgggtaagacgaccattacgtatgatggctatgtcgaacatgattttgtggcaagcaaaccggatgttttggatgcagaagcctatttggacaaggttacaggtgctgttgattacgggcatcgaaccaattggtatgatgagttgatcaataaaaataattttggtcataatcacaatatttcattgtccggtggtagcgaaacaactattttccgtatgtctgctaattttaaaggtaaggaaggattggatatcgcttctgatcgtaaagaatacggtttacgtggaaactttaagcatacgactttggaggggttgttggaagtaggcggtaatttctcttatcgtatagctgacgaagattatacggattatgcttcgttcaagcaggctgttcagttgaatccgacgttcagtgtggatgagatggatgcattcaaaggtaatagttattcctttaatcctgtcaaaaatttgacggagcaggagaatggtgcaaaacaggaatattccacaatcgatttgaacttgaaactgaacattctgaaaaatctgaatacagaattaaagcttggtcgccaaggacataacaagaaacagtctcagtataagttcaagacacataaagattgtattaatggaaattataatggttatgcactcttgaagcaggaagcttggacagattggacattggaatggttgggaaattattcgttcaaaatcaatgatgaacatgatttcaaaattatgggcggttattcctatcagcaattcgattacgaatggttctcagcatcgaaccgtgattttccttccgatgcattcttatataactatcttcaaggcggtgagtacgaaaaggtgaatggccgcttggggatggaatcccataaagaagaagaaaaaacaatcgcgtttttggggcgtattaattataactggaatgacgtattcttgtttacaggatctttacgccatgaaggtaactctaagtttggtgaagatcataaatggggacttttcccggcagcatcggctgcttggcgtgtgtccaaattgccggtgtttgaaaacagttctgccgttgacgatttaaaacttcgtttttcgtatggtgtaaccggacgttccgggttcgaccgttatacggcacaggccaaatattctggattcggacagtactatagtgatacttatggtaaatttatcatggggtatggaccaggtaataacccaaattatgatttggcttgggaaaaacagatttcttacaacttgggtattgattatactttatttaactctcgtctgtcgggtagctttgatgcattcattcgtgaaggtcgtgatgtaatcggtgaatatcctgttcctttgccaccgtatctgcatgataaaatttatgcaaatgtgggtacaactacatctaaaggttttgagttccaagtgaattgggatgcagtacaaacaaaagatttttcttattctacaaatttgaatttggcttatacaaaatccaaactgaaatcattctctaacgaaaagtatcagttggggtatatagaaggtgatggattcccctctccgggtaatcctggttcggctcagcgtctagaagacggaatcgagataggttctttttatggattccgttatgcaggtgtcgatgatgcaggtaatatcctgatttgggaaaaaggtgaagaaggtggagtaacgaagttgggagccgatggtaatgaacaggataaggtttatctggatggaacaggtgttcccaagtgggagttgtcttggggaaatacgttcagatataaagactttgatttgtctttgttcttccgtggacgttttcgctataaagtgatgaaccagtatgaaatgtattatggtctgcaagtggtttccggcgataacaagttatcttccgcttatgaagaaaatgctcatatcaaaggcccgaaagtgatttgtgactatttcttgcagaatggtaattatttacgtttggacaatatcacattgggttggactccgaaattgaatacgaagtggatttctaatttacgtgtgtatggtacgttgaagaacgtgtttacattgactaagtattcgggggtagatccgacgacggtgacgactacaggcttgtggccgggaatcggtggaatggaggtctatccgactgcaaggaatctgacatttggcgtacaaatcacttattaattaaattaagagacagaacatgaaaaaaattaaattattatgtgctgcaggtttgttgggtgctcttgccatgacatcttgtacggatctgacagaaaaagtatattcagatttagtgagagacaattattatacggataaattgtctgttgaagctgccgtggttcgttgtttcgaacatagtgacaatgttacgtggcgtggtgatatctggaagttgcaggaattgacaggtgaccattttgtctggacacagaaaggacggcacggatatgacgatggccaatggattcgcctgcacgaacataaatggaactatattcaaggacagatcaacggtgcttgggtggcatcttaccagtgtatcagtcaggtaaacacggtgttgcgtgatttcaatacggttgattttagtgcgatcggtgttactgatgaagagaaggctgcttattatagtgacttacgtgtattgcgggcttggtactacatgtttttgttggatttttaccgtcaggttccaatcgctacggaacaacaggcttctgatgaaatcgtgcctcagagtacagcaaaagaggtttatgatttcattgagtcggaattgaaagaatgtatccctacattgccgaaagaaaaacgtctcggacgttggacacagggaccggcagccggtttgttggttcgtctttatttgaatgccaaggtgtggattggtgaggatcattatgctgattgtaagcaatgggcggaagatattattgccggtaaatatggtacatacagcataaaccaacaagattatcgtgatccgttccgttctggtatcaataaatatcagtctcctgagaatatgttcgagttttggcacgaacgcggtcgtttggaacaacagacgatgtgggcagatggtatgcactattctgcagcccagacgattggtagcgatggtggtggcaacaacggtatccatttgcagccttctcgtgacttccaaggaaatgtgtatcagtttgccagcggactcggaaatccatttgaaaaatatgcgaagtgtgactatcgtgtaattcctttccatacgacagatgcgaaaggtggttatgaaggtttcttcttgcaaggggcacagatgaaatatgacgagtcgaagcaatatggttttacagatgaaaatgtgaatggctccgaagaatggatgggtttcccgttggtgtttgtcgaccaggtagggcgtttttcagaagataagtcgttgaacgccgaaaacaagaaacaagccttgttggatgctgctgcccgtgggggatatttcatttgtaatgacgctgatgtgatcgcgaaaggttctcaggtgactaccggtgaagaaaattccggtttccgtttcaataaattcccttatttaccggatcatgatggtttgttccgttctcagtctactcctgagatgcgcttgtctgaaatgtattactcattggcagaatgctattacagggaaggaaataaggcaaaagcagctgaactattggattatgtacgggtaagaaattaccctgcggaagaatggtcgaaatatagctatgtggcaaatctggataagttgacggattctgaatttttagatgagtggggacgtgagttcatcggtgaacgccgccgccgtattgatttgattcgttggaataaattccatgaagaatggtggaataagggaaaagatgctacagacaaagaatatagctatttccctattcctcaaaaccaactgaatgcaagtccgatcctgaaacagacaactccgggttgggaataatggtgcatggctgactgaaagaatggctattttgaatattaatgtagcacttaattataataggctattttttcagaataatataacgagtctgctgagtttttcttggcaggcttgtttgtttttagggcaatcaaaattactatccgggatcatctcttttcccttatgaaaatttcgcataccaaccatcatactgtcatttctggttgttaactgttgctttacagtatgttaaagtatgatagttgctgtttttcactatcattctaccatcatgcatctatcatgatttttacatgtcggtttatttatatggttgataatgggatgtttgcatttatataagcccaaatggtcatcgataaaacgagatcgtttttgtgttaaaacgaccttgtttgccgaacaagatgcaaaaatgagacataaaaacacccacggcatggcggataaacatccacgcatccacggaaaggccttgcacagacccgggtctgcacctctcccacacccgggtctccgtggctcttacacccgggtctcaagcggctctgcaagccgtttttgacaaaagaaaagccggtcttgatgaaaaatgaagctgttttaacatgttttgtacctgttcccggacggtctctgtttttgtcgtataattgatacactggatgttatcgtttttttcgccatgatggttatgacagatgaatgatagtaaaaaacggcaactgtcatgctgtaacttattggtttaaagttgtatatagacggatatggtagtatgatggttggttttgcaaaacagttatgtaattagtccgtatcggtgacgaaaacagatggatgctttatgattttggtgctctggtttgtctttacaaagtatagaaggtgtcgtagatttcctaaatagtatcataattgatcaatgtcaattgtggtattcttttggcatttgagtgttactcttgtatagaggagaatttttaatattgtgatgaatttggtaaagtaaagaatttttcactgatgtaaaaaataatggggagtttgtgtttttagttttaatctccgctggagatgatttagtatttccagcggagtattttcattaagttgtcgaataagtaaaaactgaaatatttttgaaagcatgaagagttatatattagtatcgataagtttattattgtgttcttgtcaggcaaaattaccggtgaatgttcctgaattgtcagatgggaatccgacaacctgtttcgtgggaacggaaggggtaaataaagtgatttttgatgaacaatatactgttcccatccaaagttataaaatctattcgtccggcgagacgcctgttcacgatccgtctgcctggacattgaaaggttcctatgacgggaagaactgggtggttgtggatgaacggaaagaccagacgttctgttcccgctatcaggaaattctttgttcgataaccaaaccttccaattataaacagtatatgctggaagctgctacggcagttggtgatacattggtgttgggagatgtggtgttgttcgatgagaatctgaatgccggctgggaggatttcaaatatccggaaatcgattacgaagtgattgatccggaaactaagggggctgccatttatgcggatcttgtccagaatccggacgaatacatacgttatcacgctcgaaaggtagccgaaattcttttctattcggcaaaagatacgatgaatgatgttcaaaaggttcattatacgttgaaagattatgacggagtttcagccaagagtggtaatccggccaatacctcgattgtttacagcactcagcatattgagaaatcagcgaacgaatccctctataagctcgactttgaaacacgtggtgtcctgtttcatgaattggtacacgcctatcagttcgaaccgaaaggaatcggttcctattcaaccaacaaaacattctgggcttgtatcgaagggctggcggatgcagtccgtgcccaagcaggatatttcgatatgagtacccgtaaaccgggcggtaactggatggacggttatcgtacgaccggcttttttatccaatggctgacgaccaaagacccggatgccatccgcaagttccatgagacggtccgcgacctcgacgaatggagtttcgacaaggcgatgaagcgtatgttcggcgatgatgccagcattgaagggctgtggaatgagtatcaagcctttttatcaaaataaatatagaaacaagatatcatgaagaagacaattcttttattttcagctttgctgatctttgggaacttgtccgcccaagataaggcagcattggtgaatccgattatcgggacaaacgggatgggacatacgtttccgggggcttgcgtgcctttcggactggtccagttgagcccggacacggacacgatccctcataacgtggatggcaagtatcagccgcgtgcctatgaatattgtgccggctatcaacataaggacagcagtatcgtcgggttcagccatacgcatttcagcggaaccggacattccgacctcggcgatatcctgattatgccggctaccggcgaattgaaactgaatcccggaacggcaaccgacccggatggcggctaccgttcgcgtttctcacacgatacggaggtatcccgtcccggctactatgaagtgatgctggccgactacggcgtgaaagcacaactgacggcaaccaagcgggtgggtgtgcataaatatacgttcccgaaagaagcgaagaaccagcgaatcattttggatatgattcatggtatctacaattacgacggaaaagtcctttggacgaatatccgggtcgaaaatgatacgctggtcacaggctatcgtatcacgaacggatgggcgcgtaccaactatacttattttgccatgtctttctccaaaccggtcgttcattacggatgcgaggaaaaagcaaaagttaattaccggggcggatacggcaaattcaatatgaaagaaaactttccggatataggcggacgcaagatcgttgcttatttcgatttcgatccggcggtttccgaggaattggaagtgaaagtggcgctttcgggagtcagcacggatggcgctttgaaaaatctgcgggctgaagcctccggctatagtttcgaccggttggcggctcgtgccggtgaaacctggaataaggaattgtccgttatcgaagccaatggtacggacgaccagttggcgatgctgtacacctctttgtatcacaccatgatcaatccttgtgtctatacggatgtggacggacagtatcgcgggttggatcataatatccacaaggcggacgatttcacgaactacacggtcttttccgtttgggacacctatcgtgccctgcatccgctgttcaacatcatcaaccgccgggtaaatacggatatcgcccgctccatgctgaagcattgcgagcaaagcgtgcataaggctttgcctatctggagccatatggcaaatgaaaactggtgcatgatcggatatcattccgtttccgttttggccgatgccgtggcgaaaggtcttccgttagacaaggaagaggttttgaaagcgatggtgagcagttccacgatcccttacctggacgggaccggcgaatatatggaaaaagggtatgtcgcacttgaccataacggtagcgccgcttccctgacgttggaatatgcctatgacgactggaccatctaccacacggcgcttttggccggcaaccgttctgttgccgatacgtataaaaaacgggcggccaattatacgaatgtttttgatacgaatatgggctatgcccgtcctcgttatgccgacggacgctggaaagagaatttcaacttgctgaacacgcatggtgaaggttttatcgaaggaaatgccttgaactattctttctatgtgccgcaggatgtggacaatatgatccgcctgatgggaggcgacaagtcctttgtctccaagctcgattccctgtttacgatgcacctgcctgccgagtttttcgcccagaccgaggatgtgacggaggaaggcttgctgggcggctatgtgcatggcaacgaaccgagccatcatatcccgttcctgtatgcctggacctcgcaaccttggaaaacgcaatattggcagcgtgaaatcatgaataaaatgtaccgcaataatatcgacggcctgtgcggtaacgacgattgcggccagatgtctgcctggtatatcctgtcttcgatggggttctatccggtttgtccgggtacggaccagtatgtgctgggagctccttacttgccttatatgaaggttatgctggaaaacggaaagacttttgaggtaaaggccgacaaggtgagcgacaaaaaccgttatgtcaagtcggtcaagttgaatggcaagccctatacgaaagggttcattactcagcaggacattatggatggtggtacgctgacgttcgaaatgacctcttctcctaataaaaaacgtgtttttaacgggacagacagaccctattctttgtcttcaaattaattaaacatattctatccatgaagaaattattaattttagcgattacgctttgcagcagcctctttacggtggatgcggctgacaaaaaggacctggtggattacgtgaatccgctggtcgggagccagtcgaaaatttctctctcgacaggtaatacttatccggcaattgccatgccctggggtatgaatttctggatgccacagaccggaaagatgggagacggctgggcgtacacatacgacgcggacaagatccgtggtttcaagcagactcaccaacccagcccttggatcaacgattacggacagtttgccattatgcccgttaccggtaaagtggtgtttaaccaagataaacgtgccagctggttttcccataaggcggaagtggcaaaaccgaattattaccgggtgtatctggctgaccatgacgttgtgacggaaatcacgccgacggaacgtgccgccatgtttcgcttcactttccccgaatcggacaactcgtatgtgattgtcgatgctttcgaccgtggttcttatgtcaagatcatacccgaagaaaacaagatcattggctatacgactcgtaacagcggaggggtgcctcagaacttccgcaactatttcgtcgtcgtgtttgacaagccttttacttataaggcgactgtcggtgatgatgagatccgcaaaggcgagactgaagcgaaagagaaccataccggtgccattgtcggtttttccacccgcaagggcgagattgtccatgctcgcgtagcttcttcttttatcagccctgaacaggctgaactgaacctgaaagaattgggcgatcgttcgtttgacgaaatagccgaggctggtcgccaagtgtggaatgaaactttaggacgtatcgccgtggaagacgacgatgtggacaaactacgcacattctattcctgcctgtaccgttcgctacttttcccgcgcagtttctacgaacttgatgcaaacggaaaagttgtacattacagtccgtataacggagaagtgctgccggggtatatgtttaccgataccggtttttgggatacgttccgttgcctgttccccttcttgaacctgatgtatccggatatgaatacgaagatgcaggaggggcttgccaatacctataaggagagcggcttcctgccggaatgggcaagtccgggacatcgtggctgcatggtcggtaataactcggcttctgttgtggcggatgcttacctgaaagggcttcgcggatatgatatcgagacgctttgggaggctgtcgtgcatggggctaacagtgtacatccgaaggtgaaatcgaccggacgtctgggatatgaatattacaataaattgggctatgtgccttataacgtgaaaatcaacgaaagtgccgctcgtacgttggaatatgcttatgacgactgggctatctataaactaggtaaggctttgggcaaacctgaatccgaaattgccgttttcgcgaaacatgctatgaattataagaacctattcgatcctgaaaccaagttgatgcgtggccgtaacgaggacggttcgttccagtctcctttcaatccgctgaaatggggagacgcctttacggaaggtaacagttggcattatacctggtcggtcttccatgatccgcagggactgatcgacttgatgggaggaaaggtcggtttcaacgccatgatggattccgtattcaatgtcccgcctttgttcgatgacagttattacggtggcgtgatccatgaaatccgcgaaatgcagattatgaatatgggtaattatgcgcatggcaaccagccgatccagcacatgatctacctatacaactattccggcgaaccctggaaagcacagtattgggtgcgtgaagtgatggacaagctctatttcgcgactcctgacggctattgcggggatgaggacaacgggcagacttcggcatggtatgtattctcggctctcggtttctatccggtttgtccgggtaccgaccaatatatcttagggtctccgttgttcaaaaacgtgacgctgaacctggaaaacggcaagaaggtcgtgatcaaggccaacaataatggcgaggcgaaccgttacatctcgtctatgaaagtgaatggcaagaactatacgaagaattatctgacacatggcgacctgatgcgtggcatgaacattctttataatatgtcggccacaccgaacaagagtcggggtacgcaggacagtgacgctccttactcattctccaatgaattgggaaaataaataagattgcatatagatggctggaagcattaatattaacataagcacttaattataataggactttcagtctaactataatcaaaagggctatttggaccttgtttcagatagtcctttttatttataacgacaatagtttgaatatgaaattacgaatttgtactttgatcgctgtgtcgtgtgccgccttatccggcacggcacagaatgaaaagttgacggaatacgtcaatccgctggtaggaacggatggttatggcaatgtgtatccgggagcgcagatcccgttcggagggatccagatcagcccggatacggatgctaaatattatgatgcggctgccggttataaatataaccacacttctatcctgggctttagcctgacgcatcttagcgggaccggtattcctgacttgggagattttctgtttatccccggaaccggagagatgaaactggaacccggaagccgtgagaatcccgatgagggctatcgttcccgatacacgcacgacgaggaacaggctactccgaactattatgccgtccgcttgcaagactacggcgtgaaggcggagatgacggcaggggtacggagtggcatgttccgttttacttatcccgaatcggaaaaatcatttatcatgattgatatgaaccatacgctttggcagtcgtgcgaatgggccaacctgcgcatggaaaacgattcgaccatcactggctataagttggtgaaagggtggggacctgaacgccatgtctattttgcagctgtcttttccagaaaattgacgggtctgcgcttcatgcaggacaagaagccggtgatctataatacatcccggttcaggagcgaccgtgaggcttgggggaagaacctgatggcttgcctttctttcgcaactggggaaggggaggaagtgatcgtgaaaacggccatctcttccgtcagtacctccggggcgaagatgaatatgcaggaactggacggactgacatttgacagcctcaaagagaaaggggaggaactttgggagaaagaattgcaaaaataccggataactaccgaccggaagacaaaggaaacgttttatacttctgcctaccatgccgccctccatccgtttgttttccaggatgtggatggccgtttcagggggttggacaagaatatcgagcaagcgaaaggctttaccaactatacgactttttctttgtgggacacctaccgggctttgcatccctggttcaatttagtgcatcaggacataaatgccgacatcgccaattcgatgctggcccactttgacaagagcgtggagaaaatgctcccgatctggtctttttacggaaacgagacttggtgcatgatcggctatcatgcggtctccgtcctggcggatatgatcgtcaaaggtgtgaaaggtttcgactacgaacgggcgtatgaggcgatgaaaacgactgccttgaacgaacattacgactgtttgcccgactatatgcggaatggctacgtcccgtttgacaaagaggcggagtcggtttccaaaacattggaatatgcctatgacgactattgtatcgcacaggctgccaaagctttgggcaagatggacgattatcagtattttctgaatcgttctctttcttatcagactctgatcgacccggaaacgaagtatatgcgtggtcgtgacagccagggtaattggcgtactccgtttactccggtagcttatcaaggaccgggatcggtgaacggttggggagatattaccgaaggttttacaatgcaatatacatggacagttccgcatgatgtgcagggatatatcaatttggcagggaagaaacttttcgagaagcgactagacgatctctttacggtcgaattgccggacgatattccgggagcgcatgacatccaggggcgtatcggtggctactggcatggcaacgaaccttgccaccacatcgcttatctgtacaactatttaggcaaaccctggaaatgccagaagtggatcagggagatcgttgcccgtttttatggaaatgaaccgggatcgttgagcgggaatgacgactgcgggcagatgtcggcctggtatatgttcaactgcgcaggcttttatccggtagccccttccagcaatatctataacatcggctccccttgtgtagaggcgctttcgatccggatgagcaacggaaaggaaataaagatgaccacggaaaactggtcggaagagaacgtttatatcaaggagctatatgtcaacggaaagaaatatgataaatcatatctgacctatgaggatgtacaagcaggaattaccctgcactttgtgatgagcggcaaaccgaactacaagcgtgccgtttcggtggacgcccgtcccgcctcgttgtcgtcaccgggcaaaacgatgttttatcagatatctgatagcaagtaaatggacgatttctattcgattttccgataaatctcaatatctttgcatgaaacatttatctctttattaatttaaagactattgctcaatcgtaaatcaggataaatatatgggaaatatgaatataaaagatgaagcatcaataataaacagtgatgaaaatgtggttagcgatgtggaacaagccgatctgtcaataaacggagatgattcatataccatatatccgaatgccgaagtgagggtggaaaaggctcaatatagtattatgcatttgcatacactttgcctgaagcggaaagaattaataattgatccggatttccagaggcatgatgtctggaaacaaaggcagaagtccgagttgatcgaatcgatcctaatgggaattcctataccattaatgtatttatttgaggataagaatgggaagaagcaagttgttgacgggcgacaaaggataagtgctattctggattttctggaaggaaagttcaaattgaataatctgagaatattgaagcagtttaatggatgttgttttgcggatttggatttgaagcaacagggagttattgaagactttcaattacttttttacattatacagcctccgactcctgagcgggtaaagtatgatatctttgatcgggtaaatcgcggaggaactccgttgaataagcaggaaatgaggaatgccttataccgtggacgttgcacacggatgttggataaactttgctgttctcccgaatttttgattgcgacagggcgttctattaataaagaaaggatgaaagaccaatatgtcgttttacgggcaatggccttcctgatgttgcatcgtggagagtttaaagatattccggctctccaataccggggggatatagatgattttctggctcgttttatggtttatgtgaatgataatgcacctgaaaaattgattgtagattatgagaatctatttattcgctgtatgcagatcagttatgatcttttaggagaaaatggttttcgtttttcgggaaatgggattagaagacctataaacatgcctctctttgaggcattaagttatttgttttcttttgtccctgagaaaattgattacacatgggtgtcaagactcatactggatatagaatctgtaaaggaagagtttgatgattcccgttatttttccggtaatatagactcgactacaagtgtctctttcaggtttgatcgaatggataaaataataaacaggattcagttatgataaaacatatacaaataaaagactataaatgtcttcatgatgagaacttggagataaagccttttacaattgtaacgggtgttaactcggcaggtaagtcaagtttgatacagtcggtattacttcctgttcgcaggataggaaaaaatggacaaattttactggatactattgtgaatctgacattcgatacgattagaaataagtattataatgcaaaaagtgtcagggtcgatatcgatatcgataatgtgcatatttcctatcacggaacaaatgaactctctttggtttttcttccttcggaagaggatgccagcatgccgatcgacatagagcaaaatttatactatttgtctgccaatagaatcggggcggagttgcattccaaaatttcgccacagtttaaagtgggcgtagtcggtgagtatatagtaggttcatttgaaaaagaaaaatctaatcctttaatgccggaattgattaaagatgattcctcttatactttatctgctcaggtgaattattggttgtcttatattttagatataccgacggagttgcagacggaacgccgtttggatgatgtggtcgaggtacagtataaaagtgatgggttggggaatatttcgcctttccagttgggagctggcgtaagttatcttaccaaaatgttgatcatgtgcttgcgggcaaaaaagaatgatgttattcttatcgaaaatccggaaatccatcttcatccggccagccaggcaaaggttggtgaattcttggcctttattgttagagccggtatacaggtaatcatagaaacacattgcgaacaccttatatataaggtcggttatgagatttataaaaagcgttttttgaaagatgatgtgaccattttgtataaagagggcatccagaatccgttcattgtacttggttttaaagaggatggcaagtttactcgtgacttcccggaaggttttttcgatgcgactttagctgaactacttgaaatggaataatatggggaaatatagttttgtgttgtctgatactttgtataagcaatattatttgtttaaggagcatcaggactatgataaagatatactcttgcacttgcttaagtttcgttgtggcgagtttctgaccaataccagacaattagatgatatcgggattggcgatcgtgtgtcgaaaagtctttatgactctttaaagcatgcccggttaacaaagcagactttggaagaactggcaagaaagactgactataaattgatattgtgtgatgacagaacggattatccgtatgtcaatatcatgtccgatcagatcagtagccatatcaccggttgtttttatagaaatgcccatagagacaaggcgatcaggcacataagagcactatgccaggatgcgaaaaaaatatgcctgtacgatcaatacctgaatgcctgcaaggatgtcttgaaattgattttgccgaacaaaaaagtagaacttgtctatcattcgaagcatttgaatgatagtgctgttgctgatttgcaaaagtataatcctcaatggtctttttctttggatgattcactgttgacccagcgtgatcgatatatcgtgattgataataaaatggaaatcatcttatccagcggttttatgtatttggaattgacgggtaaggaactgacttatgtggtgaggcctgttcaggaaaacaggctgttggtgaatggctgaagaaaaatgcggaataaagggctatatcgtattatcttctttcgcgaatacagaaaaatttctatatttgcaccgcctttaattaggaatcagatactttctaaataaatcagattaagaaatgacaaagagtgcattacaaattgcaagagcagcttaccagccaaaggttcccgctgcattgaaaggcgctgtaaaagccgtagatggtgagtatacacaatcagttgccgatcaggacgaaatcaaaaagttattcccgaacacgtacggaatgcctgtcgttacttttgaaaagagcaacgaaaagaaagaactgccggcaatgaatgtcggtgtgatcctttccggtggtcaggctcctggtggtcataacgtgattgcaggtctgttcgacggtatcaaggctaacaacgcagcttctcgtctgtatggctttatcctcggacctggtggtctgatcgatcataaatatatggaactgactgctgacattattgacgagtaccgcaacacgggtggttttgatatgattggttcaggccgtaccaaactggaaacaaaagaacagttcgacaaggggctggaaattctgaaagaactgaacatcaaggctctggttatcattggtggcgacgactccaacacaaatgcttgcgtactggccgaatactacaaggctacgggggccggtgttcaggtaatcggctgtccgaagacgatcgacggtgacctgaagaacgagcagatcgaaacttctttcggtttcgacacggcttgtaaggtttattccgaagttatcggtaatatccaacgtgactgcaactcggcacagaagtactggcacttcatcaagctgatgggacgttctgcttctcacatcgctttggaatgcgctttgcagactcagccgaatatttgtatcatctccgaagaagttgaggaaaagaacatgtctttggacgatatcgtgacttacatcgccggaattgtagcaaaacgtgctgccgaaggccacaacttcggtacggtgctgattcccgaaggtctgatcgaattcgttccggctatgaaacgcctgatcgctgagctgaacgacttccttgctaaacacgatgccgaattcaagatgatcaagaagagcgaacaacgtgcttacatcatcagcaagttgacaaaagaaaattccgacttgtatgcttccctgccggaaggtgtggcacgtcagttgtcactcgatcgcgacccgcatggaaacgtacaggtttctctgatcgaaacagaaaaattgctgtcagaaatggttggcaagaagttgtcagaatggaaggccgaaggcaaatatgtcggcaagtttgctgcacagcaccacttcttcggttacgaaggccgttgcgctgctccatccaactatgatgcggactactgctattctttgggttatacggcttcttgcctgatcgccgccggcaagactggttatatgtcttccgtacgcaacacgacagctccggctgacaagtggatcgctggtggtatccctgtaactatgatgatgaacatggaaaaacgccacggcgaaatgaaacctgttatccagaaagctttggttaagctcgacggcgctcctttcaagaaatttgctgctaaccgcgatgaatgggctatgacgacaagctatgtttatcctggtcctatccagtattttggtccgactgaagtttgcgacgaaccgactaagacattgcagttggaacaagctcaataatatatctgacgatatataatcaatcaataatgatagaggtaaggcacttagctttacctctattttattgtcatactatcatgctttgctgttgaaactatgaatgtcaagccccacataaaatgatagttggcatgacagttgtttttctatgattgtactatcatgggtgtgatcgcttttttacgcgtactatatggtttattatcagatatgtagttgcttttgtctgtcgagatccggatctcagttatctgcagaccagggtttcgatagctttcagatgggggtgtaaaaggcgctctgacgggcattttgagaaaaacatcaggcgtcttttgtctaaaaagtaacgtgtttcgacagaaaaggcttattcttttctgaaaacgttccacttttaatgcttttagcgtacttctatgtctggtaaaacagctaaaatgatagttaggggtgatttatgatctcttctaatctttccatattcttcctctttgtcgctctcacgatcaggaaccagtcgatgatgtaccagattcctagacctccgcctgtgagcagtttaatgatccctttaccccagtccccgatcaggaaacgatccaaaccgaagtatcctaagaaacaagaaacggacaacatacagatcgggcttttgaaatggttttttgctaaaatcgcctctttttcaggaggaaggtcgagcagtcgatggataggaatttcataatcaggaaatttgctttcattggcaagaagaaatttgtctactttatctgcttccatataatattaagtattattgttatatgtggcaaatataaggtttttccgtatctttggacttcgataatcattaaaacaacaatcttatgttttcaggaattgtagaagaaacagctcaggtcgtggcgattgagcatgataaggacaacattcatatcactatgaagtgttcttttgtcgatgaattgaaaatagatcagagtgtggcccacaatggcgtttgcctgactgtggttcgcaaagatagggatacattcacaactacagccatgcgagaaactctggaacgttccaacttggggctgctgaaaccaggttcactcgtgaatttggaacgcagtatgatgatgaacggacgtctggacggacatatcgtgcaggggcatgtcgaccagactgccgtttgtacaagtgtggaagatgcaaatggaagctggtattatacgttcgaatatccgttcgaccaagagatggcgcagcagggatatataactgtcgagaaaggttccgtctgtgtcaatggtgtgagcctgactgtctgtaattcgaagcagaatagttttcaggtagcgatcattccgtatacgcatgacaacaccaacttctgccagatcgaaaaaggtacggtcgtcaatcttgagttcgacattgtcggtaagtatatcagtaagatgatgcagttcaaatgaaagatttcctctctttagcaagccggcgccaaagtgaccgggcttttgatccgcagcgtccggtggaaaaggaaaaattacagcgtattctggaggcggcgtgtatcgcgccgtctgcttgtaattcccaaccttggcattttattgtggtggatgatcccgaactgaagaatcgggtggcagacgcaacttcgaaccgtgttttgggaatgaaccatttcaccaaacaggcgcccgtacatatcttggtcgtggaggagaggccgaatctgacagcaggtatcggctcgtggatcaaggacaagaatttctcccatctggatatcggcataacggccgctcaccttgtgctggctgccgaagatgaagggttggggagttgtattgtcggctggtttgatgaaacgaaagttcgtaaactattggatatcccttccggcaaacgtgttttgctggacatcgttatcggctattctacccaaccggacagacctaagaaacgcaaagatctgaaagaagtgattagctataatcggtactgagatttatggattatgatttatgcagtgtaacaggaaatcataattcataaatcctccttcttctcttccagaaccccatcttataataaacgaaggtcacgattagtccgattgtgatgctgataccgatcgcccaccagattccgttgcgtcccaaccatgaactgagataataggcgaggggaatacggatcagccagaggcagaccaggctggttatcattgggaacaaggtatctccagctcccctgagtgctccgttgtacacgttcagcgccccatgtacaatgaagaaaccaccgataattagcagatattcttttccaatcgccacgacatctatgtctttcgtgaaaattctcatcatctcgttgccgaatagatagacggcggcaaaagttaatagtcccagggctatattcgtgtacatcgtaaaccgtactccctttttcacccggtccagtctcccggccccgatattttgtccgcagaaagctgctaacgctcctgatagggtgaggatagcctgagtgatgatcgtgtctatctttccggcggcaccgtaagctgtcagtgtattggtcccgaagctattcacgatccccagcaatgcgatcagtccgagggcgatcgcacattgctgtacgcttgtcggcagtccgatttttaagctctctttgaacagtttccagtcgaacagcatatcttgctttttgatggatagtaaggggtgcgtattgtttacatacgccagggctatacacataccgattccctgcgaaacgacagtcgcacgagcagctccctctataccccatttgaatacgagtatgaagagcaagtcgaacgcaatgttcaggactgtcgtaatcagaatgaacagcattgggcgaacagactcgcccacgcctcgcaaaatcgaaatgatgctattgaaggttacgaacaggaatgttcctcctatgtaaatgcgaaaataggctaccgcttgtggaataacctcttccggcgtattggtcaggcggaaaaccggctcggcgaaaataatccctgcaatggatagtattattcctccgactaacatgaatatgaagaaggaggaaaacgcaagttgtaccttttgatactgtttggctccgaaaagttgtgaaatgactaccgtagtaccgcttcctacaccgatcacgagcgaaatgatgaagtaatagatgaaaaaggaagccgataccgctgccagtgcctcctttcccagaaactgtccgacaataatgctgtccgttatgttatagaactgttgcagcagatttccgaccagcaacggcaatgcaaagcgaacgatcactttccatactttcccttctgtcagatctgtattcccttttcttttatccatcccttaataattgtcaataatccattgtcaattgttcaaaggtctttcaacaaaatgttgtcattcgccttaatcatgtcctcgcgggttttcagcaaggctttccattccttgctgaacaatttggacgtgtcgatcttgaagttctccgagccgtattcgtccatgcgtgtcagtagataactgacagtgatcttgtttacgtcgatggccggctggtagtgaacgacgcgttcgtcatctccgtaattgacttcgataatgatgtgcagttcggtcagttgatagagtatctgtgtcgtgatacggatcggtatgcggtaagcgtctgacaattcatctgccgtataaggcttttctccttttacgaaccgttttacgatcagggacgctatcagcagcgtgaggaaatccttatatcgccggctgatgttcttgctgtcacgctcgaaactgaatttcttcacgttttgggaagcatacgagatttccgccccgaacaggcagatcagccatgacaattgtaaccacagcaacaacaggggcaaggcggcaaaactaccgtagatcgcgttgtatttgctcacccagatctgcccgctgatgtagataaactggaagaattggaatgcgatgcctgacaggattccagccacgaggccgtttacaaaccgtactttcgtattgggtaatgaaatataaagtcctgtgaatgccaggatcgtaatgaggtagggagttatgttcagtatcagttcgaccagtggagtaaagaaaaagtactggctgataaatgagttctgcaaagtggacaggaagatggataaaccgctggaagccgtcatcagtaccggtaaaatcaggaacaaggccagataatcggataacttccgataccacggacgtgatttctgtatctgccagatgtcgttgaacgtgtcttctatggatgagatcaggttgacaactgtataaaatagcaggatcaggccgaccccgatgattacgccgccttgtgcttgctccagataactttccacgaattcgaaagccttggtcaattccacttcatgtccggggaaatagtcgaacaattcctggcgtacggtgttttggaagccgaaccctttggctatccccaacagaaccgccaggagaggcacgatggatagcaaggtgctgtaggtgagggcagaggctttcgtttgaagattctcgctctgaaaccccctgactgcaagaattattgtcttgatgatgttgatataaagctctttcagtccgcttacttcattttcggtgatccgccaaatgtcgtaagtgacgaaacggatcattcttgtcagtagggcgttgatccgttctccgagcgtctttttaccggttgttttcatatatatgatgtgccaataaattaaatgtgccaatataccgatagaaaaccatttaattggcatattgttgaattggtatactggcacattataaaaaagcagcctgcctataagccgggttctgtactcccgtttgcacgggagcgtctgtcatttatctcgtcttactgtcaccagtaagctttagcggtctaccccccggcatcggacgagcaatcctacatgcgccggtatacatgaccttacaacccataaggcgtacggcatcctatattgctataagacccggtgagctcttacctcaccttttcacccttaccggacaggccggcggtcgttttctgttacgctactctacccttacggacagcttcccgttaagaagtatggtgctctttgttgcccggacgttcctcccgtcctgaaggacgagcgacagaccggcagactgcaatgcgacaaaggtaattcttttaatcgacaattgaaaattgaaaatagggataaccacatcaaaatggttcggtatggttctcttttacttttcttccagtctaatttgttttcgataatgccatgtatatgttcgacattgttgaaaataaattacatagatatctgatggcaggtttatgggaaacattctgcctttcctgctgttatattattgaatgtatgaccatttggcagacagttgattgttaaaaaggtactttgcattacacagtactgttaatcgcagttaagcccttgcagagtgccgttaaaagtgataaaaaaatagttgcaaatggaataatcgcacgatttttgacttttctttgtcgaaagaaaaatgttaaatttaaatgtttgataaaataatgagagtatgaaaaagatgtggaaaaatgtgcttggtatagttctcgtggctgcaatcagtgcgggggcggctgttgggacgagtgcttacctgattaataagaatcaaccggtatttggcacttccggctcagcaaataccttcaatcagccgatccggctagccggttataacacggttgctgcagagaatacggattttactacggctgcagaaagtacggttcatggcgttgtgcatattaaggccacgacaaatgccaaacaatatgccgacggaggcaatcagccgcagtatgtcgatccattcgagtatttcttcggattcggaggacgtggagggttccaacgcccgcaaccgcaaccacgggtcggggccggttccggggtgatcatttcgaccgatggatatattataacgaacaatcatgtgatcgatggagcggatgagctggaagtgacattgaatgacaatcgtaagtttgcagccaaattggttggaaccgatccgacgacagatatcgctttgcttaagatcgatgcgaaagatcttccaaccattccgttcggtgattctgaaaaactgaaagtcggggaatgggtgttggctgtcggtaacccgtttaatttgacttctacggttacggctggcattgtgagcgcaaaagggcgtggtatctcgatgggaggtggagacaagagcaagatcgagtcctttatccagaccgatgcagccgtgaaccccggtaatagtgggggagcgctggtgaatacgaaaggggagttggtcggtattaatactgctatttattccgaaacaggaaactttgcaggttattcgtttgcagtgcctatcagtattgcagggaaagtggcaaacgacttgaagcagtatggtacggtgcagcgtgcaatcctgggtgtccaaattatgagtgtgggtgacatcgccgacatgctgggctatccgaacttgccggctaaacagaaagaagagctgagcgccttgaaatccaagataaaagtttccgaaggtgcgtgtgtggctgatttcgcagatcgcagtactgccaaggaagccggaattgaaaaaggtgacgtgattgttgctgtaaatggtgcaaaagtgaaatctgcgaatgctttgcaggaacagattagtaaatatcgtccgggtgacaaggtacaggttactgtagaccgtaatggtagcaccaagacatttaatgtggaacttcgtaacgcacagggtagtacggctgtagtgaaaggagccgccgacagtgctgaagttttaggagccgcttttagcgcgttgacaaacgaacagaaacgtgaattaggtgtaagttatggtattgaagtgactggtttgttgaatggtaaactgaaagatgccggtatcaaaaaaggcttcattatcatggttgtaaacgatcagaagatttcatctcctgaacaacttgagaaaatagttgacaaggttttgaaaggaaatgaggacgatcgttatatcgtagtaaaaggtttctacccgaatggacgtacgaaagtatatgctatagacctggctgaataataaaataacgttatatttgtcttatttggcgggaagattgttaaaggtttataattggctgggtgtagggtgcatccagccaattctgtcaataaaaataatattatctttgcaccctgatattctcaatataaaaacattggatgagacagttaaagatcacaaagtccattaccaatcgcgaaagcgcttctctagacaagtatcttcaggaaataggccgtgaagatctgatcacagtagaagaagaagtagaattggcacaggctatcaaaagaggcgaccggagagcattggaaaaattgaccagagcgaatctgcgttttgttgtatctgtagctaagcaatatcaaaatcaggggttaagtttaccggatcttataaatgaaggtaacctggggttgattaaggcggctgaaaaatttgacgagaccagaggttttaagtttatttcctatgctgtgtggtggattcgtcagtctattttgcaagctttggcagaacagtcaagaattgtacgtcttccgttgaatcaagtggggtcgttgaataaaatcagcaaagccttctctaaattcgaacaggaaaacgaacgcagaccttctcctgaagaacttgcagacgaactggatattccggtggataagatttctgatacgttaaaagtgtcaggaagacatatctcggtagatgctccgtttgtggaaggcgaagacaacagtcttttggatgtgcttgttaacgatgatgctcctatcgcagaccggtcgttaatgaacgagtcattggcaaaagaaattgatcgagcccttgctacattaaccgaaagagaatgtgagataatcaaaatgtttttcggtataggctgtcaggaaatgacattggaagagattggcgacaaatttggcctcacaagagagcgtgtccgccagatcaaggaaaaagcaattagaagactaagacaaggtacgcgtagcaagctcctcaaatcgtatttaggttaacctcctccggaggaagacaaaaggatttaaaaagccctttatccgtcaggataggggctttccttgtttttttaggtttaggcttatggttttcatgtacattataaagatctataaaatcattccgtatatccataaactgttgtaaagtgagagataaaaaaaagttgcagttgtaacgttcagaggttcagaagttagcgtaaagagatagcaaccgggtgaaaaaaaagttgcagaaatgtttggtggatatgttgtaaagcactacttttgcatccgcattcgagagagaacgcaggtgtttaaatgatgaaacaaaaaacttttgaaaaaagtttcgataaaatttggaagttaaaaataaaagttattatctttgcacccacgttcgctaagggaaagcgaaaaaaagttctttgaaagcattacatatcaacaagtagtacaagagacgtagtaggaatactgacataccgtcaagactacaataaacagatagagattctgagcaaaaggtataaaacaaaatcaacaacgaagagtttgatcctggctcaggatgaacgctagcgacaggcttaacacatgcaagtcgaggggcagcatgatttgtagcaatacagattgatggcgaccggcgcacgggtgagtaacgcgtatgcaacttacctatcagagggggatagcccggcgaaagtcggattaataccccataaaacaggggtcccgcatgggaatatttgttaaagattcatcgctgatagataggcatgcgttccattaggcagttggcggggtaacggcccaccaaaccgacgatggataggggttctgagaggaaggtcccccacattggtactgagacacggaccaaactcctacgggaggcagcagtgaggaatattggtcaatggccgagaggctgaaccagccaagtcgcgtgaaggaagaaggatctatggtttgtaaacttcttttataggggaataaagtggaggacgtgtccttttttgtatgtaccctatgaataagcatcggctaactccgtgccagcagccgcggtaatacggaggatgcgagcgttatccggatttattgggtttaaagggtgcgtaggtggtgatttaagtcagcggtgaaagtttgtggctcaaccataaaattgccgttgaaactgggttacttgagtgtgtttgaggtaggcggaatgcgtggtgtagcggtgaaatgcatagatatcacgcagaactccgattgcgaaggcagcttactaaaccataactgacactgaagcacgaaagcgtggggatcaaacaggattagataccctggtagtccacgcagtaaacgatgattactaggagtttgcgatacaatgtaagctctacagcgaaagcgttaagtaatccacctggggagtacgccggcaacggtgaaactcaaaggaattgacgggggcccgcacaagcggaggaacatgtggtttaattcgatgatacgcgaggaaccttacccgggtttgaacgtagtctgaccggagtggaaacactctttctagcaatagcagattacgaggtgctgcatggttgtcgtcagctcgtgccgtgaggtgtcggcttaagtgccataacgagcgcaacccttatcactagttactaacaggtgaagctgaggactctggtgagactgccagcgtaagctgtgaggaaggtggggatgacgtcaaatcagcacggcccttacatccggggcgacacacgtgttacaatggcatggacaaagggcagctacctggtgacaggatgctaatctccaaaccatgtctcagttcggatcggagtctgcaactcgactccgtgaagctggattcgctagtaatcgcgcatcagccatggcgcggtgaatacgttcccgggccttgtacacaccgcccgtcaagccatgggagccgggggtacctgaagtccgtaaccgcaaggatcggcctagggtaaaactggtgactggggctaagtcgtaacaaggtagccgtaccggaaggtgcggctggaacacctcctttctggagctggaatctctagattaagtccgatgaggtatgtagctctctggtactacggttgaatatgtatatatatatgatcttaaactggaaagaccagtatatagagagaaagatgatgctgagatgaaaatttcaggcacataacggttgacagtcctatagctcagttggttagagcgctacactgataatgtagaggtcggcagttcaactctgcctgggactaccagttgaaaaacgggggattagctcagctggctagagcatctgctttgcacgcagagggtcaacggttcgaatccgttattctccacgataaactccgtaaggggtaaaaaaagatctttgacgtattggacaacttcaaaaaagtaaagtaacgaaaaaatagagcaagctgaagatatatcaatccgacacgggcttcaattttagcaataaaaggaagcagtgtcagtgataaagaaagtaagcaagggcagacggtggatgccttggctctcggaggcgatgaaggacgtgataagctgcgataagcttggggtaggtgcaaataacctttgatcccaagatttccgaatggggcaacccggctggtggaaggccagtcattccgtaaggaaggcgaacgtggggaactgaaacatctaagtacccataggagaagaaaacaaaagtgattccgcaagtagtggcgagcgaacgcggaacagcccaaaccgatgatgtttaggcattgtcggggtagtaggaccacgttgtggcaagagattaaggaagtagaacgttttggaacaaacggccgtagacggtgaaagcccggtatacgactctttaacgaagcctagtggaatcctgagtagcgcggagcacgagaaattctgtgtgaatcagcggggcccatcccgtaaggctaaatactcccgagagaccgatagcgaaccagtactgtgaaggaaaggtgaaaagcacctcgaacagaggagtgaaatagtccctgaaaccgtctgcctacaagcggtcggagcacattaaagtgtgacggcgtgccttttgcataatgaacctacgagttactttctccggcaaggttaagggcttcaggcccggagccgaagcgaaagcgagtcttaatagggcgtgatagtcggagtgagtagacgcgaaaccaagtgatctacccttggtcaggatgaaggttgggtaacaccaactggaggtccgaatgggtatacgttgaaaagtgttccaatgaactgagggtaggggtgaaaggctaatcaaacttggagatagctcgtactccccgaaatgcatttaggtgcagcctttatttagtatagcatgaggtagagcgactgattggatgcgagggcttcaccgcctatcaagtccagataaactccgaatgcgtgctatatattgataaggagtgagggcgcgggtgctaaggtccgcgtccgagaggagaagaatccagaccatcagctaaggtccccaaataacagttaagttgaactaacgaagtcggactgcagagacagctaggatgttggcttggaagcagccattcatttaaagagtgcgtaacagctcactagtcgaggagtccggcgtggataatactcgggcataaactgtttaccgaagctatggatgtagaaatacatggtaggggagcattccaacggcgtcgaaggtgaaggatgacctttgctggagcttttggaaacgcaaatgtaggtataagtaacgataaaggaggtgagaaacctcctcgccgaaagactaaggtttcctgatcaacgttaatcggatcagggtaagtcgggacctaaggttaagccgaacggcgataccgatggaagaatggtttaatattcccatactactttatggagcgatgtggagacggagaagtgaaagtcctgccatctgacggaataggtggttgaagagtgtagatgtagattcctgtaggcaaatccgcagggagagtcgaccttgatagtatgccgcgtgcttgcacaaggcaaaatggacgtaatcaggctcccaagaaaatccgctaagcatattcataaagtacccgtaccgtaaacggacacacgtagttgggttgaaaatactgaggcgctcgagtgattcacggttaaggaactaggcaaattgaccctgtaacttcgggataaagggtccctactgagaggtagggcgcagagaataggtccaggcaactgtttaacaaaaacacatggctgtgcgaaatagaaatatgaagtatacagcctgacacctgcccggtgctggaaggttaagaggagagctcatcgcaagagaaggcttgaattgaagccccagtaaacggcggccgtaactataacggtcctaaggtagcgaaattccttgtcgggtaagttccgacctgcacgaatggtgtaatgatctggacactgtctcaaccgtgagctcggtgaaattgtagtatcggtgaagatgccgattacccgcgatgggacgaaaagaccccgtgaacctttactatagctttacattgaatttgggcaatcgatgtgtaggataggccggaggctatgaatcaggcacgccagtgtttgtggagccgccgttgaaatacggccctttggttgtttgagttctaacccgcagaagcggggacactgtatggtgggtagtttgactggggtggtcgcctccaaaagagtaacggaggcttctaaaggtaccctcagaccgattggtaaccggtcgtagagtgtaatggcataagggtgcttgactgggagacagacaagtcgatcaggtaggaaactagagcatagtgatccggtggttccgtatggaagggccatcgctcaaaggataaaaggtactccggggataacaggctgatcgctcccaagagctcatatcgacggagcggtttggcacctcgatgtcggctcgtcacatcctggggctggagaaggtcccaagggttgggctgttcgcccattaaagtggcacgcgagctgggttcagaacgtcgtgagacagttcggtctctatctatcgtgggcgtaggatatttgaggggctctgacactagtacgagaggaccgtgttggacagaccactggtttaccggttgtaccgccaggtgcaccgccgggtatctaagtctggattggataagtgctgaaagcatctaagtacgaagccagcctcaagatgagatatccctagagggtcgttgtagactacgacgtagataggctacaggtgtaagggcagcaatgtcgaagccgagtagtactaatagcccgagactttcgatcatgtaagggttgatatatcagcaggtggctgatgccatatgtttctattagttacttcaggtaatggggttgtccagtcaaaatcttacaaagaggtattaaggtggttatagcgttggggatccacctcttcccattccgaacagagaagttaagcccaaccacgtcgatggtactgcgtaaaagtgggagagtagatagccgccgttttttaggagtgagagcgaaagttctccgtgaaggaagccgattcagttttgagtcggcttttttcgttcccgacagcccattctttagagatcgtgtttttggatggcgagtttgtcctccacgacgttatgtttgatttgcgtgtaatgctcgtattgtaatgtcccaagatccggcagcacgaatggggggataaatgatccgaccgttcagtggagaaagcccgacttggatcagaattctacactgggagtatagaggacacgcggtgtacgacaagaggcttaagtaaggccgttcaatgaagaggattaaccagccttacaaatggaaggcatatcgtctgaaaagcaggaatccagaatccgggattccggaagatgcattctaggagcgggagggtctgataaaaaacggggcctctcagtgttgagagcccccgcataaaagatcttattaagatagcaaacgcttcgattaacaaattctttttttgaagtcatagtcaaggttacatattttttcttagtcaaggacttggatgcacaaacgtaggcattccttttttactatgcaagtatttgtttgtttatttttgaaacaatcggattttactctctgagttattggaaaaagtcggcatgtcgaccgttatcgtggtcacttgatgggggcgtgacgggatatgagcatgagttttgcaatggatatatttttgtgattactctttatcgattaatcggattccttcaggctcgatattgattatcttttttttgtaaagagccccgattgcctgtttgaatgcttttttgctgcagcgaaatagggaataaataagttcaggttcacttttgtcatggacggccgcatatcctccttgagctttgagtgaatccagaatagtcttggcaataccttctaccttttgatatcctaagggggtaaggctgacatctatcttttcgtcttttctgacttctttgatatacccttttagatgttctcctttttccaagcgttgaaaaacttcattgtgataaaccaatccccaatgagtattgttgatgattactttatagcctatttctgtgtcttctgcaaccaacaaatcgacttcctggttaaaggagtaattggggattacattgtctaaatatttatcgattctagcggaggcaactatacgtccagttacatgatctacgtgtacatataccaaataccattttccttctcgcatgggcattttttgttccttaaatggaaccaataaatctttcattaatccccattctaaaaaagcacctgtattattaactgatttcacttccataaactggaattctcctgcttgagcaagtgggttggctgtcgttgcaatcagcctgccttcattgtcgtggtaaataaaaacctcgacttcatctccaggttttacatttttttgcacataacgggccggcaaaagtatctccatcccatctccaccatccagataaactccaaagtccagatcttttatgatctttaatgtattatattttcctatttctaccatttcgctatttattttgaggcaaaagtacgggaaaatagcctaatatcctatattttttatttctcaagcagcaatataacaaaatttgcatcgttatagttgtaatagtttttataaggagtttttagatggacggttcctttgaaagttgtatctttgcagttctaatttagaaatacttaataatagcatgaggttgaaatattatttattagccattttttgtgtattgatgtgtgcatgtaaagcaccaaaagatgtgatttattttcagggtatagatgatttaactcctgatgaattggcagagatgagccaagcatatacgattaaaatagagaatgatgatcttttgtcaattaatgttacggcttgggatcctgttgccgttacaccttttaatcctccagtgtttgcatattcatcacaaggagaacagccattgattgcttctgagtcaatgtatacttatttagtagatgaagatgggtgtataaattttcctattataggaaaggttcatgtagcgggattgactcgtcaagaaatttccaaaaaattggaatcaaagatttctaaatatgtgaaagatcctttagtgaatgttcagcttcttaattttagaatagtacttatgggagaattttcgcgtcctggttcatattcggtaaaaagagatagggtatcagttcttgacgctataggtatggctggagatttgcctcttactgcaaataggaaaaatattttggtaatacgggataacaatggattaaaagaaacatgtcgtttggatattaccaacccaaacatattcgaatcgccatatttttatttgaagcaaaatgatatagtatatgtagaacctataaaaacaaagcaacgtgcaagaactagttcggatcgtcagtttacaatatctttattttcgacagtgatcagctccttgtctgtgattgttgcgatggtgttaagcttaacaaataagtaatatggaaaatatgcagaaagatagtgagactataagtctgaaaaaaataatagtagattatttatatcattggaaagtttttttagttgcagcttgtatttcattagtttgcgcaatactatatatggtgctttatcctcaaacttatgaatttgtggctcgaataaagattcaagaagataaaaatcttgggagtggtggaagcatgggattgggagaggctgccggattaatgaaatcgtttggactgggaagtatttcggggggagctgtcaatatagatgatgaaattgctataatgtcttctaatgatttgttgaagaaagttattatccgtttgggattaaatgttacatataagaaaccatattcattgatttctttatatgaagattctcctttgttaattattccggactctttgactcaagaaaatttggactgttttgtttcatttaaaatagaggtaagtaaaaatggtgctgttttaataaaaatgaaagaaaccggtaaagagtattcttttgcctctttacctgctcagcttcgagtgccagaaggtgtatttgatatattatatggaacagaaggagatgtgacgaagaaaatagaaaagcctttttctttgaacatatctgtatctccggcaggttggatggcagaagatttggcagaggcaataactgttgaagagttttcaaaaaatgccaatacattggaactattgtattcggactattcaagaaaacggggcaaggatctgttgaatactttgatggatgagtataataatagttctgagtctgtaaaaaaagaagaaggacataaagctatgacttttttagatgttcgtatcaatggtgttttacaagagcttaatggtattgagcgcactattgaaacttataaaattaagaataaattgacagatatagaatatgatgttcaattttatgctgatgcagtgaaaaatatccgagaaaaaattattgaatatgaggcgcaaaatcatatcattaatttgttagatacttatgtgaaggatcctaaaaataagtatagtgtaattcctgccatgttgtctgctgatggcgaaaaaggtggagctatatctgcttataatgaggctttaatggaaagagacaaaataactaaatcaacaaactcagtgaatcctttgtctgaaatagctgattctcagatagacaaattgagagatggggttgttttggctattgataatgcacgaaaaagctctcagtttgtattgaatgatcttaagtctcaagaaaaagcaattatgagtaaaatggactatgttcctacatacgaaagagagtatcttgattataaaagacagcaggaaattcttcaaggagtgtatttaatacttttacagaagagagaagaagttgctttgtctttaggtcaagagcgtgataagggatttattgtagatgctgcagttgctaaatatcgtcctgtagctccaagaaaactttttgcagttttaggatttctgattttaacaattgtaattccaatgggatatttgttcgcaaaacagcaattacgagatttgatagatatttataaaagaaagtgagaattatatgcaagttattatattagccgcagggatggggaagcgtttgggggaacttactcagaataatacgaaatgtatgattcgggtaaatggtgtgaccttaattgaacgtgttttggatcaattctctaaattgaagttgaataaggttattatggtaatcggctataagggagaggaacttcgtagttttattggtgattcatataaggggctaccgattgaatacattacaaatccgatttatgataaaacaaataatatctattcattgtctttagcaaaagaacagttgcagcaggatgatactttacttatagaatctgatcttatttttgaagacaaggtgttggataaaattttatcagatccatttcctaatattgcattagtagccaagtatgaaagttggatggatggtacagttgtgatgttggataatgacaataacattctaaactttgttgtaaaaaaagcattcaattttgatcataaagaattttattataagacagtcaatatctataaattcagtaaagagttttcaagaactcattatgttccatttttggatgcatatataaatgcattgggtaataacgaatattacgagcaggtcttgcgtgtaattgcattgttggataagccagatttaaaggcgttgccacttcatggtgaaaagtggtatgaaattgacgatattcaagacttaagtaacgctgaaactatttttgcggaaaaggagaatcagttggtttgctatcaaaaaagatatggtggttattggagattcccttctttgttggatttttgttatttggttaatcctttctttccttctttgaagatgaagaaagagatgcgggctaattttgatattttattaagtgagtacccttctgggctgaatgtaaactctctattaattgcgaaatatttcggattggcacaacaatatgtttgtccgggaaatggtgctgccgaattgattaagtatttaatggatgaattaacaggttgcttgggtgttgtttatccgacttttgaggagtatcctaatcgtatgcaggaagataaggtgattgcttatgtcccacagaataaagatttttcttatacagctgatgatttgatggcattttttgcagttcgtgaggttgctgctattttattgattaatccggataatccttctggaaattatatttcaaaagttgatgtagttcatttagctaaatggtgtaaggataagaaggtaacattggttgtcgatgaatcgtttgtcgatttttctgaacaatcagtggataatactttgttgactaatgaaatacttgaagaaaaccctaatttggtggttgtgaagagtatatccaaatcttacggagtaccagggttacggttaggagttttagcttcatcaaatttgcttttgatcgatcgtgtacgcaaaaatgttccgatatggaatattaattcatttgcagagttttatatgcagatatttaataaatatgaacaggattataaacaggcgtgtcgtttgtttatccgtgagcgagatcgtttttatgtggatttacagcagataggttatctacgcatcataccttcacaagcaaactattttttgtgtgaggttattagtaaatattcttctaaagaattgactgaattacttttgaatgaatataatattttaataaaagactgtggaacgaagaaggccttccgaaatggcgaatatatacgaatagcagtacgttcaactttagacaaccaacgtttaatagatgcattaaaagaattataattgttaaaaaagatggcaatgaaaataatagactttgaaacgatacgaaatctttccatatctccggctgattgtgtaaagtgggtagaaacagcattaagaatgaaatatgatagttgtttacctcataaaattagtatgacaatagaaccggatgtcttttttaatacgatgccatcttatttgccttcttgtggacgttttggggttaaggtcgtttctcgttttccgaaacgtgagcctgcattggttagtgatattttgttgtatgatgcgacaaatggtgattttttggcgctgatggatggaagttggattactgcgatgcgtactggtgctgttgcggcattgtccatacagtatttgaggacttcttcagctcgggaatatgcatttatgggactaggcaacacagctcgggctacactgttgtgcttgatggctgtgttagaggggccgttgaacattcgtcttttgtcttataaagggcaagagctggagttcacgaagcgctttaaagaatattctcgattaaatttttctatttttgaaaatgtggaagatttgattacaggtgcagatgtggttgtatcttgcgtaactgttgcacatggtcagtttgcatcggatacatgttttaagccgggagtattggtcgtaccggttcatacgcgtggatttcagaattgcgatttattcttcgatcaggtttttgctgatgatgtcgctcatgtagaaggatttaaatattttaatcagtttaaacagtttgatgagttcgcccgtatattgttaaagcagaatccgggtagaacttcagatcaggagcgtattttggcttataatataggtattgctttgcatgatatttattttgcttctcaagtatacgacaaggtcaaagattcattaccagatatttcttcggataagttaagcgagaagttttgggtatgaattagttatgaatagcaatgaagtttggtcaagataataaatacaaagtaattgttcataatacaacgtatttgtctgtacttgagatattaaaaatggtaatgccttttgtagcattaccttatttgatatctacagttggtgcggataagtacggtttggtcgtttttgcacaggctattatctcttattttattatatttatcaactttggtctggatgtttcggctgtaaagaatgtttctataaatcgttctgataacgagaagctatcggaagttgtatcttcagttttgattattaaagcttttctttttatactttcttttttagcattaggagttttattattatgtgtgaagcaatttagagataattatgttttatttttattgtcttttttatcttgcctttcagaaattttgtttcctgtttggttttatcaaggggtagaaaagatgaaatatattactttgattcgttttacttctattttcttttatactgttacagtctttattttcattaaaaatgaaagtgattatttactgataccattacttcagtctttagggtggcttttatcaggggttatttccttttttatgctgattcgggtagaaaatatatccttatttgtgccaactatagaatcgattaggcggtattttaaagagagcgttccgttttttgtttctcgtgtatcagttgtgattaatgcaagtatggcaaagacgatttgtggaattttcttttcaatgcatgaggttgcagtttttgatttggcccaaaaaattgcaatgacggcacttgtccctttacaaatgttgaatcaagctttgtttcctcatattgcaaaaacacttgatcggaaatttgtcaataagtgttttcgattgattttattagctacaggctgtatcattgtaattgtatatattcttgctccatttgctgtttttgttttatcggatggtaagttgcctgaatctgttgatatattacatgtttttagtttgttcatttttagtggaggcattacttctttcacagggtcgccagtgctggtttcttttggttattccaagccttttaatcgaagtgtagttctttcgactttcgtcttaattgtaatttatatggtactatattttacaaattcattctcgattattaattttgcactagccttaggttttgcagaatttgtaatagctatttataggctatattattgtaaccgttataaattaattatgctttatggacgggtttaatcgttttaatccagaaggttcagtgctgagacttcatcagatgaagatgcttcgcattttagagttcgtagatagagtttgtaggaaacatggtatacgctattggcttagttcgggaacattgttaggtgctgttcgtcatggaggctttataccttgggatgatgatttggacatagagatgttatatcgggactataaaagattgatggaagtcttgccttttgaattgccctctaatttggtgcttcaaacaatgcacactgatagtaactatgttgccccttatgcaaaattaagggaaacggattcctatatatcagaagtgaataatattggtagaaattacaaatataatggggtttatattgatattttttatatagagcctgttaattatcggatggcatggattgcatctaaatttcatggatatatttatagactttcttatttaaaaaatgaccgattagggataaaaaaaggagtaatgaggtgtttgttgttctttttgacttatatactttatccctgcattcgaatgattgttaaattatctcatacaaaagagtaccgattgggattaggatcaggttttttgggcgtaaggttgttggacaatatttttccactaagtgaggtgtcttttgagggaaaaatttttccagctcctgctaatactgatggctatttgtcctatttatatggagattatatggtattgccagatttgagtaaaataacttatcatgtaaataatgtggatataaaagaataatataatcgaaaatgaaaaaagtgatgcttatttttggaactcgcccggaagcaattaaaatgtgtccattggtaaaagagtttcaaaaagatacgataaattttaagactgttgtttgtgttactgcccagcatcgggaaatgttggatcaagttttacatgtttttgatgtcaaacctgagtatgacttgaatataatgaagcaagggcaggatttatatgacataacttctcgtgttttgttaggcttacgtgatgtgttaaaaaaagaattgccggatatcgtattagtacatggggatacaacaacctcttctgcagcagcattagcagctttctatcagcagatacctgtaggacatgtagaagcagggttgagaactcataatatttatagtccttggcctgaagaaatgaatcggcagataacaagccgtattgccgtttttcatttcgcaccaactgaattgagccggagaaatttacaaagagaaggtgttgcagacggtaatatctatgttgttggaaatactgttattgatgccttgcatttagtgttagagcaaatcggggtaagaaaagatatagagaaaaatattcaatttgtattagagcgcgtaggtattcctctttctttattatctttgtggaagagtggagagcggaaaatggttttaattacaggacatcggagagaaaatttcggtgaaggatttatccatatttgtaaggcgataaagactttggctgagaaatattctatggtagattttgtgtatcctatgcatttgaatccgaatgtacggaagccgattgctgaaatattgggtgaaagccataaagaaaccctaacaaatgtatttcttatagaaccattggattatcttccttttgtttatttgatgaatcactctacaatcgttttgactgatagtggtggaatacaggaagaggctccgggattaggaaagcctgtgctggttatgcgggatacgactgaacgtcctgaagcattggaggctgggactgtcaaattggtaggaacaggttataattcaattatagataatgtttctgatttactggaaaataaagatttgtatcgacaaatgtcaaaggctcaaaatccgtatggagatggaaaaaccagtcagtctattgtgaatattttattgtaaatcgtttttatgaaaagaaaaatattagttattcataatggatatcctttgcgtggtgatggaggtgataaagtcagaacattaaatatgcttcaatccttggattctattggatttgatgtttgtttgttggcttttttcaagaaagatttttctttgttggctttaaataaaaaaagtatgccttcgaatataaaatcatattttatatttacattaccagatcgttggggattaggagggatagcggcattgtttcgggctgtaataacttggattattgtaaagtgtaaccatatagagttaattcaattagagacatcgctttcggcttcatgtgtcagatatttgaagaaaaatattttggtcgtgactgattttcatgcagatcctgtacctgagttacaaatgaatggaaggacgaaatcatcaataaatcgtgctgaaaaagatgtttgttatgcattgtctcgttcacaacgaataatagccgtgtcgaataatttggcaaataatctaaagaaatattactcttatgattgtccattttctattttaccttgtagttttaatagtgaaaagtttcatatagatccggctcagatgatcgctttgcgtgagaaaatgcatttgaaagagcgtattgtcttatgttatttaggagggttgcagaagtggcaatgtgtggaagaaacattagatatttttttacgtttaaaaaagaaagatgatagatactttttatgtatatatacaaatgatgatttgactcctttcgcaaaaaaaatagaattgttggggaatgactgtctttgtatgagtttgagatatgaacaggttcccttatatttgtccattattgatgctggttttgtcttgagacataatagtttggtgaatataaatgcttctccgactaaaattgcagagtatatggctgtaggagcaatggttattgcaacgaaatattcgggagatgccaaagtccttgttgaagatagtggttacggcatgattttggatgagatagaaaatatttcatcagaaatgatagatgagttgaatttaaagattcattcttataaagaaaataaggaaaatgcctctgcaacaataaaaaattatatatttaaaagtaggctttggcatgcaaatgaaataaaattgaagagtttgtattcaaatatataattcggtttataatgggttatttggaaaaaataaaatatattcttagaggtagtcaatattatcgtaaatattttcagacaacagttaatagcctacggtattattttagaaatttacactattattggcagttgtattcttttaaaaaagatcgtgaagtatcgggtaatactctttattttattatagatccaaatatcaaacatccaggattagtcgatcgttttaaggcaattgttggattgttttatgtggctaaaataaacgggtttgattttaaagtgatttttaaccatccatttaaattggaagaatatttgtctgtgaataagtataattggatagctaatcagtccgaattaagttatagcttgcagaatgttcggcttataccgtataatggtagtggaaaaatacctagactgagtaaaactattaagcagtatcatgtttattgttatataggatatgatattatatcttcaaatcatgtcttagatgctgaatctgtatggagaaatttatttttggaattattcaagccttctcaagcattgaatgaatgtttgaattgttgcagtttagatagttctggttatgtcgctgttcatttacgatttgtaaatgctttagaaaatttcgagaaagatcagtttaatagcctaacagaagataagcgagagaatttaatacaacgttgcctaaaaggcattaggctgattatagaccaaaataaaaataagcagattgtggtcttttcggatagtaaagtctttcttgaacgtgtgaaagtcttacctgtaatagtattagatggaaaagtcgggcatatatcctttactgaaaacactcatgaagtcgcaatgaaaacatttgtagatttttatgcgatttcaaaagcaagtcgtgtaattaggatattagcacctgaaatgtataatactgtcttttcttattatgcagcagtattaggggggatcattcctgaagaattacacgtttagtaaattattatatacattaaaagtttgctgggctatgtgatcccaattatatgcttttaagtcataatatacaggataattgttttgatatatcttatatgttagctgttgctttaaactgttcatgtgatttactttgaaatagtgctcttttgataatcccactgccaaattagcaggaatatcgctaactaaagtatcgatattgtagctcatagcttctaacaatgtgataggtaaaccttcatgggaagagggtaaaacgaataatcctgcatgtgaataaagctctttcaatgattcaccttttaccattccagtcaatataacttgcttttttcgagctaattcttttagataagttgaataagatgttttatggtcagaatctcctgcgatgactaagtgataatcctgtaagtttagatcggagaaggccataattaatttgtcaaattctttttcttttacaaatcggccaacagctaaaatatattttctgtgactaagtcctaatgatttgatatattgatcggtttgagttggctgatgaatgtcaacaccgttatagattaatattgcgttgtttctattatatttcgtttttagtatattgtcaataactgtggagatgacaattatttcgtctgcccatttagcggcgaagaattcaccggtttttaaaatgaattttgcaaaaaaattccaatttttacgatcataatctggaccgtgatgggtgacaaccactttcaatccgagtagttttgcaaatggaatggcaattgatggtccaatggcatgtatatggactatatctgctttttgtttataggcataccaaaccccacatatagtgtggatagcactttcaaatccttttattttgggagctgggagatctttgaaaaaaacaccttgataacttgttaatggaggattttcctttacaaagcaggatcttcttacaactgttacatttactccaagcttgctgaggcgtgggtataatttttcacaatgagtctctacgccgccttgtatattgggaaaacctcttaatcctgttactatgattttcattttgaagcttttaatattgattgataaatagagataagatagttgaagtgtttgtctgctgagaaatgttgttgtgcaaatttattgcaagctatagacatttcataaagcttttcttcaggtattgctatcgcttttcgaatagtttttgttaaatcggctgggcttcccattgtaaatgtgaatcctgttttttcgtcttgtataagttcaggaatacctccgatattactgcctattacaggagttcccaaggagagcgattcaataatgctcaatggattgttctcataccattcagaaggaacgattgtaaaaagtgcatttttaacgtattcctttaattcttgaccttccttaaaacctaaaaaagaaacgtttttgggatagttgtttcctatttcttttgaaagtgggcctctgccgataatttttaaatcaatttcgggtatatctcgtattgcttctaataaactattgatccccttttcattagataatctaccgaaataaagtaagtatctatgatttatttttttattgattcttgtaggtatatctggggtaaagttatatagttggactgcttttgatgcatatccaggattgaattcgatatgttttttttgggcgaacttgctgacgaaaatgaatttgtcaatataattaagtggctcgtaaaagcaagatctgaagctgttctccaatgaaagtagcatactatttgttaaatttccgttggagcacctgtttagtgtgcagtggataaaatgtcgatctttgcataattcacaaattttcccttttccgtttgttaatgtataagcaggacaaataagccgataatcgtgaacagtcataacagttggtattctatatttctgtaaaacaggtaatatagaaacagataggctattgaatagtaaatgaatatgagcgatatccggtttcttatccaaaattagtcgttctaattgtttggctgcctgtcgattgtaaatgaatgaaggtatgtttgttattttagtccaaatgttggattctgataattcaggataatccacaaaataagattcatattctgaaaatttgttttttttgttttttagggcaaaaggtattacttgatgtcctctgttttccaaggttgagattgtgttgaaaaaaacagtctcagcccctcctttttgataaaaatatttattgagctgtagtattttcatgattttgaatttgcaattttatttttcatttcactaagcattaaaccaatcatcatcatcatgaataatcctctatgagttgttatagttgaatccgatgtcccttctattccgaaaaaacaaatcagtaataatacgatgatcattaatttagcttgttttgtgtgttggaagaatataagagcttttttgaatacatatatccagaatgtaatataaagcatgattcctacaaatccgaattgtgccaatgaaggataataagtatcagcgatgaaactataaaaacttttgctaatcccccagacattctcaattccgtattgattatatatgtgggagtagtacaatcctgaggcataggtagcaaaacttccgaatccgcatccgaaagggaagtagtcgattaatatttggatagaggttgtatagagtacaaaacgtgcaattgtatctgtttctgcttctcctgtaattccttctataaagtagaaagaaactttcttccatgagacgactaatataagtattaaagtaataatgagaagaataatagtttttatatttaatttgaaatggtttatgttggaaaaatagataataaccattacagataatgtgaagaatccatagaatttggagcgtccggatataagacctatggaaagcattataataaaaagaatcctatctttcattgaaaaatctcctgtatagagaaaacaaagagatgtagctatgactcctgccgcaaaataagtcgcgtgagccattacatttgatagagtatgaggtttgaatatttctatacaagccagtattagtagaatcaaccaaaaaaatacacaaattattcttagtattttcttttgatttgttgaaaaatgaggcctaagagaatatacacagaatagggctaaatatggcttaaattgaataataaaatctgtgataatagcagcttttgtgttgctattgatgcacagagaataacataaataaaacaggaatacgccaatggttgttaaaaaagctttatttattaaccactcctgtgatttgaaaagtgaatatccgaataatataaataataaagttgcgcatatttcatcgataaagtcaaatccgatagttccatatagaagtaaaccgaatatgagtgtaaagacaaatagtgagaaaaactgtttattgatgaaatcttgaatcatatagtgttaattgttttttgtgtaacggtatgtatttgactttattgtatccaaagataatctctttgtttatatttaggaaataaatgcgggtgaatttgtatttgtagatattaggggaggtctttacatcttttccaattgattgattttcacgttctcgctcaatgaggaattgggggaaacctcgctctgtgaatatggaataatttggattttgggatattcagccttgtctgtcggtttgtaggctccgaagaatgtaatgtagatttttttttctttggtgtcaatggcatatatacaaaagctgttgctgctgagactatcgacttcgcgtatgacgcgattatagataattccgacttcgctgggggcttgattggtacagagaagcattttttgagggggaatgcttttattttcattttcaagatcatgtatatcaaagtttgttgtaaaatggtcatgtcctcctaaataacagatgaattctcccttactgtcatggaagttgaaattgacagaaatatttttattctcccttaatttattgagatatgtttttgatatgctggagcgagatcggtaagcctctattatctcagggatcatgaaccaagggtggacaaaatcaccatcgcatagataagtattagcttttgatgaataggcttggaatgggtagtggttcaagatgattatactatgttggtcagttattcccttttttagtgcaatattacctaaccaattgatttgttcttgtgaatagtaggcataaatgcgtgtattatattcagtgcctggttgatctaacatgtctaatgagatgattcgaatagaacctccttgaggattgggtatatctgcatagaaataattttgatttgtttgagtttgcttaggaaatagaatggagtgaattttttctttactgatgtaattttttgagactttttctatcatattgcagtcgtgattgcctgtgcatataaaagacgggatatgattcccttcgtagaaatgttttgtaaatgattccatgaaaagaatagcatcttttcgactggaattggaaataaagtctcctgttgctatcaaagcattgattttgagtttggattgattggcgaaggttacggattgttttagatttatggggtttgtataattgttattagtagatattgcggatatatgtggatctgatatatgaacaatcttgaaacgttcatatatcttgtcggtatctgttttgttgtacatgatcgaatctaggcgttgggttgcttcactattgttgattgtatataagtaatcatgtatgtcactgcgtaaggtagatactgtaagattgtcttctgtgtctctgcatgcaacagcaaaaggtaagacaattataacatatattaaatacaatgttttcttttccatataatgattatgttaggtgacttttggtaatttatgaatcaatgtgttaatactatttgctaaagatagggaaaaaattgaatctttttacagatatagaggaaaaagaatatgatggaaaatagaaagggacagtgttctgtcttccctgttttcggctgattaagactggaatcacctaattcctgtgcagttgctcctatccattgtactgtcttaccaatatccgccgtcggaattctttttatttggggtgggttgccgaagcgcaccgagccaggttttcgacttgtgtcgttttgcccgtatcctggcgaattgtcgcttcaaggagttttgatagacagacaagatggtggcggcgcgggcttcgatttatatagcggggaagaaccttggggtgtattcactgggttcacaggaaacaactggcttatagttgtttgagatgatgtgaaggtgaaatggtgacttatccattgaaataaagatgctcgatcaggattttggtgccgatgccgatcaggatcaatccgccgattaggtccagtttgaggtctatcttgcggctgaagtggttgccgaagtagacgccaaaagcggagaacaggaaggtgacgatccctatcgtcaaggcttccagtgcaatggctgattcgatgcaggccagcgatatgccgacagccagcgcatcgatgcttgttgcaatgcctaatccgcacagtgtcttgtagcatagcgggttcgttctgcaatcctcttctttttcctgggtactctcgtatatcattttgcctccgaggtaaagcaacagcaggaaagcgatccagtgatcgaatgccgtgatgtatttcttgaagctcatccccgccaggtagcccgctatggtcatccctgcttgaaaaatccccatcacgcagccgatcttcagcatgtggtgatgtctgtagttttgtatgagagccccaccggtgacagaaactgcgagactgtccatcgacaatcccacagccagtaacactatttctaaaaatgacatattacattaaaatgtttcttccttgatgatctcctccaacgttttccgttttttggaagtctgttcaaaaagatccagactttccggataacctatcgtgagtataaccgccggctctatcgtgtctggtaaattgaaatgcttccggcatagatccgtgtcaaagttacaaacccagcagctgcccagaccttgttcagcggctgctaagctgatatgttccgtggcgattgccacatcgatgtccatatgatctttccgatccgaagaacgtttccacgactggctgtggtcgccgcagacgagaatgtagagcggtgcggatcggaaccattcgcgtgcatagcattcctgtatttttgctcgccctgcctcttgccggattatgacgaaataccagggctggaagttgactgccgatggagccatacgtccggcttccaagatatatgccagtttctcgtcttccaccggggaggatgcatacttgcgtatcgaacaacgtttctgtgccagttctaacaggttcataattctgtttcgattttatatttgtttcgattaggcgaatctcttgaaatcaactctccgatgaatcccgcgaggaacatctgtgttccgaggatcatggccgtgagcgaaacatagaagtagggcgagttggtgaccagtggccgcaaatctcccgtgcagatggaaatcagtttcgcactcaacacaatgaccagtgcgatgaaaccgatgaaaaacatcacgcttccccataatccaaagaaatgcatcggcttctttccgaatttggaggtgaaccagagcgtgatcaggtccagataaccgtttacgaagcggttcagtccgaatttggtcgttccgtacttgcgggcttggtgtttcaccactttttcgccgatcttgctgaatcccgcgatcttggcaaggtagggaatgtaacggtgcatatcgttatagacttctatgttcttgattacgatgttcttgtaagccttcagcccgcaattgaaatcgtgcaggttcgtaataccggaaaatttgcgtgccgtagcgttgaacagcttggtcggaatggtttttgacagcgggtcgtaacgttttttcttccaaccggacaccaggtcatagccttcttcggtgatcatcctgtatagttcgggaatctcgtcggggctgtcttgcaggtcggcatccatcgtgatgaccacatctccctttgcccgttggaaaccgcagttcagaccgggggatttgccgtaattacggcggaacttgacagcgtgtaccacttccggattcttgcttttaagtgcttcgatcacttcccaggagttgtccgtgcttccgtcattgataaaaattacttcgtaactgaaattatgttctttcatcacccgctctatccaggcaaacaattcaggaagagactcggcttcattgtacagtggtataactactgatatgtccattatttgtttttattttcttcttatttttcttcggacacagggcttgctgtttgtttgcggcaaaccagtgctgctaccggtatggataatatgattccgtaaaatatattattgaaaataccctggatagccatgtggatgggagtgaagttggtccggctgatagcctcgatcacttcactgttgaagtcagcgttcttcagcgccactatggcttgtgtcatcgtgttgttcaggaagtcgggcggagcgataaactggaagaatatgaaatgctcgatcgaaacgatcagggccgcgaagaaatacagcatgatgccgaaccgccatgcatggaagaaactgatgcttcctcctatgtcctgccggtaacgcttggtcaagtaataggcgatgagaggaacggcaagacttaagccttcataaatgaagataagcgagggtatggaatacccgaaaatgaggaacagatattttatcacccaatagatgcccatagccaggccataagacatcgcgcacttcaacagtaaacctttattctcttccatgataatgctgtttttttaatgttctcatcagcaaaattaatccttttgtgagaatatacaatgcttagaattgtcaattgtcaattgtcaattgacaattaacgaacgattaacagataattaacaattgacaataaaaaagacaattgacaatcgcaattaaatatctttcttaattgtcaattgtcaattgtccatttgtttcgagcctcttgtcggattcgaaccaacgaccccgagattacaaatcacgtgctctggccaactgagctaaagaggcaggtgggtaagcttactacatcgcgccgctacaaccaagtacccttgctgcggtcaaaccctgggggattccgagggagcatgccgtgtaggacttacccgggtgcaaaagtagatattattttttacaatgcaagcgttttctacgtgtacgagtgttatttgtttgtaagtggttggaaaccttttgtttttagatgtgttaaaaaatgtatgcaatgataggggaagatagagtttgtttatgaggtgggatatttcggatttctaaataatcttgtacctttgcaaccaaattcaaaaatcaaaaacactatttacaatgggtggttttttcggaactatttctaagtcggcttgttcaactgatttattctatggcaccgactataattctcatctgggaacccggcgcggcggtatggctacatacgataaggaagccggtttcacacgttcgattcacaatctggaaagttcttattttcgtacgaagttcgagcctgctctcgacaagtttgtgggaaatgccggaatcggtatcatcagcgatacggatgcgcagccgatcgtcatcaactcccacctcggtaagttcgccatcgtgacggttgccaagatcaataacatcgaggaattggaacaggatttgctgaaagcgaatatgcacttttccgaactgagttcgggtaagacgaaccagaccgaactggtagcgttgctgattacgcagggaaaggattttgttgaaggcattgaaaatgtttacgaccgggtcaaaggttcctgttccatgttgctgctgacggaagacggtatcatcgtggcccgcgacaagtgggggcgtacgcctattattataggtaagaaagacggagcctatgccgctaccagcgaatcgagcagtttacctaacttggattatgaaatagaccgatttgtcgggccgggagaaatcctccgcttgcgtgccgacggcatcgagcagatgcgccgtccgaacgagcagatgcaggtttgctctttcctttgggtgtattacggtttcccggtttcttgctacgagggcaggaatgtcgaggaggtccgtttccaaagcggttacaagatggggaagaaggacgagagcgaagtggattgtgtttgcggtatccctgattcaggcgtagggatggctttgggatatgccgaaggcaaaggggctccttaccatcgggcgatagccaaatacacaccgacttggccgcgtagtttcactccggctaatcaggaattgcgttcgcttgtcgcgaaaatgaaactgatcccgaaccgggccatgctggaaggaaagcggatcttgttttgtgatgactcgatcgtgcgcgggacgcagcttcgcgacaacgtgaaaatcttgtatgactacggggcaaaagaggtacatatgcgcattgcctgcccgcctcttatctatggttgcccgttcctcggctttacttcgtcgaaaagtccgctcgaactgatcacccgtcgtatcatcaaggaactggaaggagacgagaacaaaaatctggaaaaatatgcgacgaccgactctcctgaatatcaaaagatggtgcagatcattgccgaccgtttcggtttgagctcgttgaagttcaatacgctggaaacactcatcgaggcaatcggcttaccgaaatgcaaagtttgtactcattgtttcgacggaagcagttgtttctaaagagatatgatcggatgaaataaggaaaatcatgtgcagaaatgcgcatgatttttttgttgttagtgacactttaattacttttatggcttgtaatattaatgataagcttatgactgtaacagatagatttttgaagtacgtgacgttcgacaccgagtcgagcgaaaccacgggtgtgactcccagtacgccgggacagcgcgtgtttgccgaagcgttggtgaaagagttggaagagataggattggaagacatcaccctcgatgacaagagctacctgatggctaccctgcctgccaatacggcgaaggaagttccgacaatcggctttatcgcccatctggataccagccccgatatgtcgggcaaggatgtcgagccgcgtatcgtaagttacgaagggggggatatcgtgttgtgcgccgaagaaaacgtggtgctttcgccgcttatgtttcccgaactggacgattataaaggacaggatatcatcgtgaccaacggcaaaaccctgttaggagcggatgataagggaggagtggctgctatcatcgccgccatgaaatacctgaaggatcatccggaggtcgaacacggcaagattcgcgtagggtttacgcccgacgaagagatcggagccggagccgactacttcgatgtcgaaaagttcggttgcgaatgggcctatacgatcgacggcggacagatcggcgagttggaatacgagaacttcaatgctgccggagccaaagtcgttttcaaagggctgaacgtacatccgggatatgccaaggacaagatgctgaacgcatcgttgctggcggtagagttcgcctcttggctgcctgtcgcgcaacgtcccgaacatacgaccggttatgaaggctttttccatctgaccggcataagcggaacggtcgaggaggcttctctttcctatatcatacgcgaccatgtgcgcactgctttcgaacggaagaaagagttgctgcacgagttggtgaagcgaatgaacgagatgcatccgggcagtacgacgctcgaactgcgcgaccagtattacaatatgcgtgaagtggtcgaaccgaagaagttcatcgtggacttggcgttcgacgccatgaaggaagtcggtgtcacacctttggtgaagccgatccgcggaggtacggacggtgctcgcctttctttcatgggactgccttgcccgaatatcttcgcaggcgggttgaacttccacggacggtatgaattcctcccggtcaagtcgcttgaaaagagcatggagacgatcgttaaaatagcagaactattggtcaaaggtaattatacatcataaatcacaaatcataaatcatgaaaacaactccgtttaccgacgtgcacatcgcactcggtgccaaaatgcatgaatttgcaggtttcaacatgccgatcgaatacaccggtattatcgacgaacacatgaccgttgtgaatggtgtgggtgtgttcgatgtctcccacatgggtgagttttgggtaaaaggtccgaacgcgctggcttttatccaaagcgttacctcgaacgacgcttccgtgttgccgatcggcaaagctcaatatacttgctttccgaatgacaagggcggtatcgtggacgacctgctggtctatcattatgaaccggaaaaataccttttggttgtcaatgcgggtaacatcgccaaagattgggattggtgcgtgagccataatacagtaggggcggaactggaaaactcttccgaccgtactgcacagttggctgtccagggcccgaaagccgtcgaagttttgcaacgcctgactccggtcgacctgtcttccattccttactattcgtttgtgacgggtgaatttgcaggttgcaagaacgtcatcatctccaatacgggatataccggagccggtggtttcgaactttatttttacccggatgatgccatgacgatctggaatgccatcttcgaagccggtaagcctgaaggtatcaaaccgatcggcctgggtgcacgcgacacgctacgtctggaaatgggcttctgtctgtatggcaacgatctcgacgacacgacttcgccgatcgaagccggtctgggttggatcaccaagttcgccgaaggcaagaacttcaccaatcgcgccgaactggaacgccagaagaaagaaggcgttagccgcaagctgtgtgccttcgagctggttgacaaaggtattcctcgccacggctatgagattgccgatgccgaaggcaacatcatcggtgtggtgacatccggaaccatgtcgcctgtcttgaagaaaggtatcggtatggggtatgtgaaacctgaatttgcaaaagccgggacggaaatctgtatcaaggtccgggggcgtaacttgaaagcccaggtcgtaaaagcgccgttccgcaagtaagcttgacgattgatacaatcgacgggtcgcgaagcttcaatcgcaagcctctttaagcggctccgtcaggcaacgaagcctgtttcgtcacacggcggaacaggctttgatatatctgattatttgtcgtacctttgcgcccgaaaataaaagaaggtgctatgttgaattttctgaaaaactggacattgcccgttgcgatgcttgccggtgcgttagggtattttatctttgccaacttcgcttttctggagccgacgaaaccgttcatgagttcttttgtggcctatctgactcccgcattgatctttgctcaactattgctgactttctgcaaagtgcaaccgcacgagttaatgccttctctctggcatggatggctgttgttgttccagcttgtttcggcttcgcttgtagctgccttgttgatattcgtacacatggatggtgcttacaaggaggttttcgagggtgcgatggtctgcctgatctgcccgacggctacggcagcggctgtcatcaccggcaagttaggggggagtgcatccagcctgacgacttacacgttgctgtcgaacgttctggcggcgatagttgtcccgttgatgtttccgttggtagaacctcatgccgatataacctttgtgaccgcttttctgaagatattgagcaaggtgttccctttgttgctctgcccgtttttcctggcgatgttgttccgctatttccttccgggactgcatcatttcctgttgggtttccgcgaccttgctttctatctctggggtgtcgcgcttgccatcgtgacggcccagaccgtgaagtctcttgtcgaaagcaatgctccggtaggagtggaggtgctgatagccttggcgggcttagtgacctgcgccgtccagttctatttgggtaaacggatcggaacccgctactccgaccgcatcagtgccgggcaggcccttgggcagaaaaacactgtacttgccatctggatggcttatacctatctggacccgctttcatcggtcggccccggatcatacgtcctgtggcaaaatctttttaacagttatcagttgtggaagaagagaaaaaatgatcccatttagagcttttttcagtcgcaggccgggagcagcagaagttcgtagtctgcgacatccagccaacggtcgaacttcaagccgacctttttgaagtgggaaacctgtttgaacccaagcctttcatgcaagatattactggcttcgttcccttccgtgatgcaggcgatcaaggctcggtagccattttcgcgacatgcttcaatcaatttttgcatcaggagcatcccgatgccctttccggtatgtccgggagacaggtagacagttgtttccagcgtatagcggtaagctgaacgctctttccacgtatgggcataacaatagccggtgatttctttgtcttcttcgtagacgaaataaggaaagcgggaagatatttctgcaattcgggcacgcatttcttcttcctgcaccggctccgtatcgaaagtagccacgctgtgcaacacatattcgttgtaaatatctgtgatcgcctttgcgtcctggagcttcacttgtctgatcatatcccttttatcttgtattcttgccgcaaaaataatgtattagaaggaaaataatctgtatttttgtagaataattgatattgatatgagattaagcaacgagtggtttaccgctctttcagagaatgaatccggacaactggtcaccgtttccggtcgtgatgaattaactgaatttattcagtcgggcaagttcaaggaacgggtggaaatcacctggaaatatgaaggtgacgataaaggaatgccttccgaagcgcttgccgaaaagatggaagaggtacaggaagttttgcgtaaggcgatggaaaaagataagctgtcgatcctgaccggcgtttataccggcggcggagagaggatatgggtctattatacccgcaccgtccgcgtttttggtgaacggttgaacgaagccctggcgccgtttgaaatgttgccgatctctatctatacggaggtggaccccgaatgggaggaatacctggatatgtatgagatgaaggagtgggccattgaatgatatgttttgcccgtaggaaaaaaatcaagggaacatggttgtagaactcggaaacatgtttggtgatatcgtccggagtttttgcttctgagttctaaatagcttctctttcctgaaagtttagaaaaacgaatgctaaatatatttacatatatttgtgagattagataaaatgtatatttaccatgaagaatcacaacaggagggattttatcaagcaagtctctgctaccggggctgttttagcaaccggagcatttgtttcgtgtgcagaaaaggcatcggcaagctgttcgggcgccggcacggaagagaatatccaaagtaaactaatcattccgaaggcgcaggggctgaaaatatccggaacttttttggatgagatatcccatgatatcccgcatcagaattggggggaaaaggaatgggatcgggattttgcttatatgaaagcgatcgggatcgatacggtaatcgtgatccggagcggttatcgcaagtttatcacctatccttcggagtatctgatgaaaacattcggctgctatatgccttcggtcgatctgattgacatgtacctgcgtctgtcggataaatacgggatgaagttctttttcggactatacgattccggcaaatactgggatacgggcgacctgacctgggaaatcgaatccaacaaatatgtgatcgaggaggtctggaagaaatacgggcatcataaaagtttccaaggatggtatctctgccaggagatcagccgtgcgaccaagggggcgatcgcggcattcagcagtttaggcaagcagtgcaaggaggtctcaggcggtctgccgactctcatctctccttggattgacggaaagaaagctgtcgctgctgccggaggcgacctgacaaaagccgaagcggtctctgtggaacagcatgaaaaggaatggtctgaaatattcgacgggatcaagggaaacgtggatgcctgcgctttccaggacggtcatatcgattacgatgaattggatgcctttttcagtgtcaataagaagatggcggataagtacggtatcgagtgctggacgaatgccgaatcgtttgaccgggatatgccgatcaagttcctcccgatcaagttcgacaagctgcgtatgaagctcgaagcggccgcccggcaaaagtacgataaggcgatcactttcgagttctcccatttcatgagtcctcagtccgcctatttgcaggcagggcatctgtatgaccgttataaggagtattttgaaattggataaataggtgattgcaaaaagtagtacgaagacatgaacatctcgccattcagggtttcgaattggttttcaccttgaatggcgggatgtttatttttttgtgcaagatgtttattgtgccaacagatagcttttgaaagtctcgaagtccttttccatccctacgctttgcttttctccttgcatgaaggcttttagtttggcggggatttcgatgtcggcatccagtattttgtctaccgtccctttgaacttggcgggatgggcggtttcgaggaacaggccggtttcgttcggagccagtttgttatcgattaaagcctggtaaccgcaagcaccgtgagggtctaacacgtagcccgtttcgttgtaaacttgcttcatggtagccccgatctcttcgtctgtgaaacggtaaccgctgatcagctggctgatttccgcgtgcgggttgccgttcttgccgtacaagtccaggatgcgtgcgaagttgctcggatcaccgacatccatcgcattggcgatagtcggaacggagggacgcggcgtgtaaacccccgtgtgcaggtattcctggaacacgtcgttgcggttgttggcagccacgaaacgtttgatcggcaaccccatccgatgtgcaaacaaaccagctgtgatattgccgaagtttccactggggacggatactaccagttggtccgctttgcctattttatccagttgcgcatacgcgttgaagtagtagaaagattgcggaaggaaacgtgccacattgatggagttggctgatgtcagcttcatgtggcggttcaactcttcatccataaaggcggacttgaccaatgcctgacagtcgtcgaacgtcccgtctacttccagtgccgtgatgttttgtccaagcgtagtgaattggcattcctggatcgggcttacttttcccttcggatagagcacgtacacatgaatacccggtacgccgagaaaaccgtttgcaacagcgcttcccgtatcaccggaggtggccaccaacacgttcacctgcttcaatccttcttttttaatgaaatagcctaacaggcgggccatgaaacgtccccctacgtccttgaaagccaaagtcgggccgtggaatagttcgaggctgtagatattgtcgcgtacagggacgaccggcgtctcgaacgacagcgtgtcccggacgattgcatcgagcgtttccggttctatatcttccccgaagaaagcctgtgctgccgtacaggcgatttcatggaatgatttgtttttgagaccggagatcgtatccttgtccaaaggccggatatgttccggcatatataaacctttgtcaccggcaaggccttttacgacggcttcttccagtgaggcaagcggagcttgtttgttcgtgctgtaatatttcataataattcttttataaattcgtctttctctaatatgccatatttcccttccagtacggagaactcgtcgaaacgcgtcacgctgtcgggctcctgtcccggtttatagataaggaaagggacgggagtattcgtatgtgtacggatggcacaaggagtcggatggtcgggcaggacggcaattgctaccggttcatcccatttctgcaattcctcgaagaggataccgatggctcgtttgtccaggttttcgatggtccggattttcagatctacatctccttcgtgtccggcttcgtcgctggcttcgacatgaagataaacgaaatcgtttgttttcagtgcttcgagggcggcatgcgcttttccttcgtagttcgtgtcgtagagtccggtggcaccttccacgtcgattacttccaggccggcataaacgcctatgccccgtatcagatcgacggccgagatgacggaaccctgcttgaagccatacatttcctgcatggtttgcatagccggacgatatcccggcgaccagggccatatgctgtttgccgggtctttcccggcagcgatgcgccggaggttgacggggtggtctttcagtatctcctgcgattgcaggatcaggttgttcagcagatcggcggtttcctgtgcttcgggtgcttccggtttgatcatcaggggacggaagggatgtaggggcacatcgtgtggcggagtgcagtccaggcgcttatcgcctcctttcacaaccaacaggtggcggtaagacacaccggtatagaaatgtatgtggtcggaccctaatttcttatttagaaagcggatcagctcgtccgcttcctctgtggtgatatggccggatgaatgattcttcaggatatcgccctccacgcagatcaggttgcagcgcatggccatttcacctggtttcaggtcatatccgatactggccgcttccagcacgccccgtccttcgtagacggtcgggaggtcgtagcccagcactgccatgttcgccacttcgcttcccggatggaaaccgtcggcaacggtcttcattcgtccggtaacgcccatttcggccagtttgtccatatagggagtgtccgcatactgcattggtgtcttgccgcccaaggcctctatcggttcatcggccataccgtctcccaagatgatgatacttttcataattctcttctaataattgtcaattatcaattgtttaacggatgttagcgatcgaaataatatcggcgaagactccagccgccgtgacatcggctccggctccatatcctttgatgatcataggatactcgtggtatcgttcggtagagatcatgatgatgttgttgctgccctccagttcgtagaacgggtggtgggcatccacttcctgcaaaccgacttcgcatgccccgttttccatcttggcgacgaagcggaaacgcttgtcttccgcttccaactgctggcgcttctcttcgaaccgggcatctaggccctgtatgttacgccaaaaatcgtccagcgagccttcaaaatagctttcgggaatgaaaaggttgcgtttcacatcttcctgttctactttgtatccggcttcacgtgccaggattaccagcttgcggatcacgtctttcccgctcaggtcgatgcgggggtccggttcggaatatccttcttctttagccatcatgatcgctttgctgaaaggaatgtccgcactcaacgtattgaagatatagttgagcgttccggaaaggactgcctccagtttcaggatatggtcgccgctgttgatcaggtcgttcatcgtgttgatgatcggtagtccggcccctacgttcgtttcgaacaggaacttgatgccgcggtgacgggctgtttctttcagtttgatatagttttcgtatgaagaggatgcagcgatcttgtttgccgcaacgaccgatacgttattgttcagtaattcttcgtacagatcggagaccgcctggttggccgtgcagtccacgaacaccgagttaaagatattcatcttcaggatttcttctttcagatgttcgggcgaactttcctgtccgttctttttcagttcgtcaatacaggtttccaggttcaacccttcgcggcagaaaatggcatgcttgctgttagctatgccgaccacattcagtttcagcccgttctgctgcatcagtttcggttgctggatgcggatctgttccaacaggttgcctccgaccgtaccgacacccgctatgaaaaggtttaacactttgtattgggaaagaaaaaaagagtcgtggatagagttcaatgccttgcgcaggtatttcagcttgatgacgaaagaaatgttcgtttcggaagccccctgtgcgcaggcgattacgctgatacctgcgctgcccagtgttccgaacaacttgccggcgatacccggagtacgtttcatgttttcgcctacgatagcgacagtggccagatccttttctgctaccgtgtcgctcatatcaccctgggcgcgttcgagtgcgaattcttcgtccaatactctaactgccaggtctgcatctgcattccggacggcaaatgtcgtattgttttccgagctggcctgtgataccataaacacgctgatgccattctttgccaatgtcttgaaaatacgatagttgacgccgataacacccaccatacccagaccttgcaccgtgatcaggcacgtgtcgttgatggaggaaatacctttgatcatcgccttgctgtcatcctgcacccgttctttggagatataagtgccccttgcagtcgggttgaaggtattcaggatgcggatcggtatgtttttgtgataaaccggatagatcgtcggaggataaatcactttcgctccgaagttgcataattccatcgcttccgtgaatgtcagccggtcgatgacataagccgaactgatcacacgcggatcggccgtcatgaagccgtccacatccgtccagatctccagcctgcgggcattaagtgctgttgccaggatagaggccgtatagtcggagcctccgcgtccgaggttagtcacttctccttccttgctggaagatataaagccgggaaccagcgatactttaggcagcgggtcgaatgtttcttcgatcaggcggtttgtcaattcgaaatcgacgatatgcttgttgaactgtttgaccgttttgatgaatttgcgcgagtcgaacagtttggcctcgtttatcacgttcgaaacgatcagagaggagatacgttcgccgtagctgacgatcgtgtcggaagttttggccgacaagtcgttgatgaggtacacacctttgtaaatattacccagttcgtcgagcaaagccatcacttgcttctgcacttcgatccgttttgttttgtcggggataacaccttgtatgacgtcgagatggcgggctacgatttcggaaaactctctttcataagctacgtctccgttcgtcgccatcgaggctgtcttcagcagtttgtccgtgatccctcctaaggcggatactacgacgattacaggctcttcaatggcctctactatcttctttacactcaggatgctatccacggaacctacggatgttccgccgaatttcaatactttcatcgatatgtatttatttagttgacaatcggtaatcgacaattggcagtttaaaaacaaaactgcatgccggtttgagaatgtcagttatttactgattattgattgatttgaaaaaaagaaacgcaagtgcaatgtgagaattgcaacaacgcgggacgtggtctccacatttgtctatttgtatatgctaaaccccccaaggggtcattgtcagtgcccaggtatgatatgtgaaacctgttaatgtcatttgcgattttccttgtgtttatatttacgtcggcaatattacgcattatttttcaaatgcaagcatttttttgcctgaaagttgaaatttgacagaaaaaagttcgatatcacgccaaaaagaaggacgtagttctaacaggacttggcgggacgatgttttagccggttttcctggccatcggaacggaagattataaaaccatcctacttgcatgagggtatagattcggtagaaaaaaagcctggaaaaagctttcctgatggtcttgttattttacaatctgaatattttttagcctttccgattaaaaaatatattattttagtttgattaattataaatttaatatatttgcatctattagtgtgtcgaatacaatgtcctgttagaactacgtcctttgattgaggatcattatgctttctataccttaaattaaaaggaaacgtttttataggccaatgtggttatacttgaatgtatcatttaaatctattgattatgaaaaggttcttttgggttctttttgtgatgtccttatgggggcatttgctgatggcgcaggaaaaggctgtgtcaggtatcgtagtttctaccgaagacggcttgccgatgatcggggtggctgtcgtagacaagcagacgatgaatggcgtaaccaccaacgaaaaaggagagttttcgatgaccgtttctcctcgtacgaaaacactgcatctctcttacttgggatataagacaaaggaagttaccatttccggccgtagcatgaagatcgaaatggagccggacatggtagctatcgacgaggtgatggttgttgcttatggtacaggaaagaagtcgacctttacaggatcggccagcgtggtcaaaaaagaatcgctggagaagatcaaagcatccaatgtaacccaggctttgcaagggcaaagcagcggtgtgcaggtgttgaacaattccggtgagccgggcgaagatgcgacgatcatgatccgtggtatcggttccatgaacgcatccagttccccgctttatgtggtcgacggaacggcttatgacggttacctgaatgctatcaacccgaacgacatcgagtccatgactattctgaaagatgcctcggccaccgccttgtacggctctcgcgcagccaatggggtcgtgatgatcacaacgcgtaagggcgcaagcgagaaagggcagatcaatttccgttcaacttggggattctccagtttggctgtagggttgccggatcaactgtcacctgaccaactatcgcaattgacttggcgtgctttgtataatggctatctggattcaggttatcgggacgaagattcccgttcctatgcgtcttattatgtgatgggtgagttcggtaataacccttataacattgatatgccggtcgggacagatgggaagatggatcccgatgccaagttgaattattggggagattggagaaacgctttgttgaaatcccgtctgcgtcaggaatatacgatagacttcagtggtaagaataaaaaagccgactactttatatcagccggttacctgaacgataaaggtgtattttctatccagcgtttcgaacgctattcaacacgggcaaacttgaactataatgtaaacaaatggttgaaggtcggaaccaacatcagtttgtctcatagcgtgcgcgaagggtctgccagtgatcagactgtatggcttttgcgtacgatgccgacagtgtatcctatttatgaatgggacagtgcgacgaatgcctacagattggacaagaacggcaatcgtatttttgactacggaaactaccgtacatcctggagtgggactaacccgttggctgatgatacctataacaagtctccttggacacatgacgatgtttccaatcgtacctattttgaaataacattcatcccgggattgaagtggcgtaccaatttcagcgtggatttttatcagtataattatgatggctatgtaaacagcgaatatggctttgctgccggttataaaggttcagcctataaggaaagcgaccggaatctttcttatacgatcaacaacctgttgacttatgagaaatctttcggggatcattctttgtctgttttattgggacaggaagcctatgctttggaatataagttgttatctgctgaaaagcagggattcccttttccaggtgttacggagatcggttcggcagccgtgatgagcagcatgaattcttacaccgacaaataccgtctgttaagctggttgagccgtgtcgaatatgattataaagaccgttattacatttccggcagcttccgtacggacggctcttcccgttttcatcccgataatcgttgggggcaattctggtctttaggtggttcatggagaatatccaatgaagaatttatgaaaccttatagttcctggttggataatttgaaactgaaagccagctatggtgctgtcggtaatgataacttggggacttattatgcttatcaaggtttgtatgcgacaggcatgaacaactaccgggatccgggtgttatggtcagccgtttgtcaaacaaggatttgaaatgggagacgaatttgcagttcaatgtcgggttggattttgccgtgttcaataagctgagcggtagtgtcgagtggttcagccgtaagtctaaagacctgttgtttacattgccgatggctccgtctaccggcatgagcggtattgaccgtaatatcggtgacgttaagaaccagggtgtcgaattctctttgaattatgctgccatatccaataaagattttaaatggaccatcgatttgaacgggacatcttataagaaccgtataaccaagttgccgcaggccgaagtcaatgccggtgtcttcaaatggcgtgaaggtgaatcccgctataatttctggggaatcgagtatgcaggtgtgaaccctgaaaccggaaacgaccaatattggaaaacgatttacgaaacaaacgacaaaggagaaaaagtcgtgaaggaacgggtaaagaccgaaaattataatgaggtgacaagcgacagccagcagaaatatctgggcgatgccattccaaaattgttcgggggctttaccaataacttctcatataaaggcatcgacctttctttcatgatctattacagtatcggcggcaagctgtatgacagcgactatgcgcaatccatgtattaccggagaggctatagcatgcacccggatatgttggattcttggactcctgaaaatccgaatgccgagttccctcgcttgaccacctactataattatgcgaattatatgagttcctatacttccaaatttattttcaacaactcttttgcgaggttgaggaatgtgacgttgggatacacgttgcctaaaaatttcacgaagaagttccaggtcaattcattacgcttgttcgtccagggggataacttggttacgattggtagtgcagcccgtcgtggtacggacccggaacaaagcatatccggaacgaccgccaaccggttcccggtgacgaagtccgtttcattcggtctgcaacttaatttgtaagaagtctaattaaataaatgatgaagaatatgaaatcaaagaactatatattgttggtattggctacaggtctcatgacgggaagtatggtttcctgtagtgattttttggatacgaaaccatcgacatctgtcgatgatacggatgtctttcaaacaacttccggcgcacagtctgctttgaatggttgttactatcaaatgcgtgcctatggtagcgggggagctaaccggggtgacgactacggtataccttctatccagatgatttcggacatgtgcggtgaagatgtgatgaataatggtagtggatggtatttatataactataattattggggagaaactcaagctaatatattccgtacagatcagttgtggaccttccattaccggttggtcaataacttgaattccgtaatcacttatgtcgatgattcggaaggcgaagatatggataagcaatatatcaaagggcaggctttggctttgcgcggatgggcctatttcgatttggcccgcttgtatcagcagacttatgctatcgcaaaggatatgccgggagttcctatttatacggaaccgactgtagacggtacacaaggtaaaccgcgtggaacgttggaagaaacctatcagcagatcttgtcagacctgacgactgccgaatcgatgttggagggttttgttcgtagctccagctatccgaacgtgtttgaccaaacggttgtacaaggtgttttgtctcaagtctatcaagtaatgaataactgggcgaaatcggaagaatatgctaaaaaggtgctggcggtttatcctttgacgactgcagaagagtatgcaaatggatttaatgaccaccttaccaaatcttggatttggggaattaaacagacggaagagcagaatatgggcgactattctccttttgctatgtggtacaacggtgatcgtaaatgttggacttttgcaggctttatcctctctgatcagtttgtggatttgtttgacgaagatgatattcgcttcaaacagttcgagaattggtctacgggttctggccagacgaaaaaagaattctggatttctcataagttcagggataatgaggactgccgcggatcgatggttgtcatgcgttccgacgaaatgttgctgaatgcggcggaagcttgtgcgcaccagggaaaagatacggaagcgaaagcgctattgtggcagcttcaggacttgcgtaatgccaagcgtacggaagcaagtggcgatgaactgatcgaagctattttaaaagaaagaagaaaagaactctatggagaaggtttttctttgtttgatatgcttcggacgcagaagggcctggaacgaaccggtaaccatatggactgggggggcttgatcacgttgcccgccaaatcatggcgtttcatcttccagttgccgggagccgaaatgaagaacaacaaatctttagtcgatgaaatctggccggccggtgaccagaatccgtttgacggggtctatgaaccgtgagattttgggcggtatgtcggagctacctccttcttggtcaaagcgatgacatacatagtcgatgattaaaggaggatttgtattcccatgatcaccggcctacatttgcaggaacgcaggccgccgtttataggaacgcaggctggtgattgcaggaacgtcgggagacattccttacgggatttgacacaattggcacatttgacatcggtttgctaaactatatataggtaataatatatattcaggtatatatatacctacataggtatattaaataattaattatttatctcgcgtatatatatttctacaaccccatgtcaaatgtgccaaatgtgtcatcgtttccctttctccatgtcttcccggcttttgctctgtgtcacgagataaacacctgtgaagaccaagacagccgacaggactttctgccaggaaagggtgtcctggccgatcatgacggcaatgaacgaggcgacgatcggctgcacgtagttgtacatgctgactgttgtcgggcggattctcttcaacgacatcgggatgagcaggtaggggaggaacgtcgccccgaagaggacgtagaagatcgcgcccagttccgtgaagtcccaaacctcccggtggaaagcgggagcgtcgagcacatgccggaaggtgaaggggaccagcgtcagtgtcgtgaagaggaacatccatttcatcatcgtgaccgatgaatagcgcagggagagcggttttgacagaaccaggtagatggcatacatcaacccgctgacgatcatcatcatgtcaccgtcgaggctgctgatgctgtcgatggcatgcgtggagctgaagacaagcagcaggccgccgctgacccccatgaacacaccgaacgacttcttccgggtgatcggctccttcagtatgacggcggccagcagcaggacgaagatcggcacggcggtggcgatgatggaggcgtcgactggagaagaacggttcagcccgacgatgaacaatccctgattgatccccactccgcaaagggcgcatacaaaaagcatccccaagtctttcaacggcactttctcttttaccgtgaagagagacacgatccagaacatcacacaggcgaaagccatgcgcatgatcgtaagaccttcggggggaacgtgtgccggcagcagatatttggatatcggcatgttgacggcaaacaggatattggttatcaatatcaggatgtgacctttcagtttctcgctgttcatgacaagtgttcttatttataacgctctttttccttgataaacccgttgcggaacgcgtaaaggagtttttcgagatcatggatctgttgttgcaggtccgcccccttgtctgtgtccttgaccatctggcggtgggagttcagttcgacgacgatggtggtcgaacggatgtctttgccctccttgatggcctggtcggtcgacaggaacggttcgtgctgtacaagctggaagccgcgcgaatggtagaccagggtataacctgcaatgcctgtctccgggtggtaggctttggagaagccgccgtcgatgacaagcagtttcccgtttgccttgatcgggttctcgcctttgatggagcgtacggggacatgtccgttgatgatgtggcggtgccggccggtgacgccgaactcgtccagcagcatgtcgcagaccgattcttcttcccggagggaatagtaggcgcctttttcctccttctgcaccgatttgtcgtcgatgaagcagcgttcgaaagtcgccatccggctcttgtcgaagagaggggagtctttgccttcccaaagataccagatgtaatccatcgcgaagtccttctccgggctgtcgtcggcatcgaaataggcggtgcgcaccaactggtccactttatccagcagggctttgcccttatattccgttccttcgatacggatcgccttgagcgtgccgtccgggttcatcgggacggaggcgtggaagagcaggttggagttgcagacctggtacatgctgccgtgcgtgaacagacagcgcatgtgctttttcagtttctcgctacattcgaacgagtgcttgatgcgccgcatcagttcttcttcttcgatcgaaagggcataggggtccttggcattgagagtcggccagttcttgtctttcaactcgtattcctttccttcgatacggatcgtcccgcggtggaggtcgatatggtggagcaacaggcggtcgtccatcccgaattccggacggcggcggatgatctcgccttccagcttgaactgtatgatcgtgatcgccttgtgcatgcgggcgatcagttgggttgtcttttcatcgaaggtcgcatccgacgcgttcgtacgcgggatgaacagttcgcaggggtcgtctccatagacttccatggcgaatgtcgccaagggcaggaggttgatgccatagccgtcctcaagggttgccaggttgccgtagcgcatgcacatgcggatcacgttggcgatgctccccgcgttgccggcggcggcccccatccagaggatgtcgtggttgccccactggatgtcgaagttatggtagttgcaaagcgtgtccatgatgatgtgggcgcccggcccgcggtcgtagatgtcgccgatgatgtgcagcaggtcgatcgtcaggcgttggatcaggttgcacatggcgatgatgaagtcattggcccggccggtcgagatgatcgtgttgatgatctggtccacataggcggacttgttcggctcgtcgcttgactcgtggagcagttcctggatgatgtaggagaactccttcggcagggccttgcgcactttcgagcgcgtgtatttggacgagacgttccggcagacgcgtaccagttggttcagcgtgatcagataccagtcgtccaggtctttttcgcgttgccggatcagttccagtttttgttccggatagtagatcagcgtgcaaagctccttcttctcgaagtcgcgcagcgtgttgctgaatatctcgttcactttgcgcttgatcgcaccggaggcatttttcagcacatggttgaaagcctggtgctcgccgtggatgtcggacaggaaatgctccgtccctttcggcaggttcaggatggcctccaggttgatgatttccgtgctggcgtctgccaccgtcggaaagctgcgtgccagcagcgttaggtagcgcaggtcgtttaatacgtgttctgctgttatatctttagtcataccctatttttttattgtcaatcgattgaaacgtctccaaagtaacagtccgagcgtggtcaggctgatcgggaagccgcaccagatgccgatggctccccaaccaaaagtgaacccgcacaggtaaccgatgggaagtgccagtccgaagtggcagaagaaagccatataagccatgtatttgacatccgagatgcctcgcagagcgttggcgaaaaggatttgcagcccgtcgcctgcctgatacaggatcactgaccaggcgagcagggcgaccagttcgaccacctctttttccggagtgatgatatatcccatgatgttgcggaaaatcccgatctggagaacaacgatggctgccgtccccatgaccagatgcaggccggcaaaagatgcgtgccgtatggcaggccagtcgttccggccccggaagttgcttacccgtatggtaaccgccgccgctatgccgtaatagaccatgaagccgagcgtggtgatcacgcctgccacttggtgggcggcgagcgccgtgcttcccagccaccccatcatgatgacactcagactaaacgagcctgtctcgactcccatctggaagccgaccggcaggccgaggcggaccaggttgcctatgttcgcccggttgactgtccctttcttgaacccttccctgtaaagtttgtaacgggaatgcttggcaaacaggacgcagaatatcccgaatgtcaggatacggctggcgagtgtcgagataccggctccggtaagcccaagttcaggacatccgaagttgccgtatataagcaagtagttcccgatgatgttgagcacgttggctcctaacatgacgcacatcggagtgaccgtgtctgtcgtgccgtcgctgaactgcttgaacgagttgaacagcatggcgaaaatgaccgagaagagttgcaggatatagtaaggcacgatatagggcatcaactcttccggctgcttcaggatatggatgttcagaagcagtgtcaacatgcagaggctgagtagcaatcccacgatgaggttgatacaaaggctgtttttcagtgtctcgcctgcctttgcatattctttctgcgcaaaataccctccgatgatgggagtcagtccataggaaaatcccatccctgcgatgaacacgaggttgaagaagttgttgacaaacgaggcggcagccagctcggccgtactgtgatgcccgaccatgatgttgtcggcaaagcctacaacaataatgcccagctgtcccaacatgatcgggacacccaggcgtatcgtttctttgtaatgttccttgtaaaccgaaagttgcatcattccaaaacctctaccgacttaattactacattttccgtcgggcggtcttgcttatttgtctttacttgctggatcgcgtctactacgtccagtccttccaccacttcgccgtagacggtgtattggttgtcaaggaagggcacgccgccgatcgtcttgtaggtctcgcgcagttcggaaggcatcttcgtctcgtctttacgcttttcggcctccagttcggtcttgccgatcagggtgtcgcggagcacggcgagctcttctttgttgccgctgcggtagagttccatgatcttggacttgttctctgtctggaggcggttgaagatggcctgtttcaggcgcccttccatctgcttttccatctggctgagttcggcttccgaatatttcttgcccgtgacgatatagaactgtgaggctgacgatgctttttccgggttcacttcgtctccggtgcgggcggcgcacaaggctccctttttatggaaatattggggatagttgaactctgccggaatggtatagcccaagtcgccggctcctaactgcttgttcatcggggcgtctttggaagtgacatcgccaccttgtaccataaagtctttgatgacgcggtggaacagcaggccgtcgtattgtccggcttttgccagcttgatgaaattgtcgcggtgctgaggtgtatcgttgtataatttgaattttatctttccgagtgtggtgtccatcaccactaatgtttcttttgtttccattctttgttgtttatttgttgactatcttcattgacttgattttgatgttcttgacaggacggtcgtctgcgttcgtttcggtgaactggatcttgtcgactgctttcatgccgcttacgacttcgccgaaaatcgtgtatttaccgtccaggtggggcgtgcctccttccagcatataggcttggcgttgttcgggggtgaaggtgatgccttgttccttctccatcttgtctagctccatttccgtaaagaacttgccggttacgatatagaactgggtggccgacgaggcgcgttcggggttctcttcgtcgcctgtacgggcggcggcgaacatgccgcgtttatggaaatacttcgggtagacgatctctgccggaatggtgtagtccagatctccgtcacctaagtgctgttccatcggggcgtctttggaattaatgtcgcctgcctgtaccatgaattgtttgatgacacggtggaacaacagtccgtcatagcgatgttccttcacatttttgataaaattatcacgatgttggggcgtgtcgttaaaaagtttcactttgatctttcccatatcggtgtcgatcagtaccagcgtttcaacctcttgcgcttgcaaatggacggatatcagagccgagagggccactaaacatatagcaaacagctttttcatcttcatcttatttttgtattatggcaacaaaaatagtgatatttactcgttaaagcaatcatttgacacaaccttttccgttggcatctgttcaagttggtaattcatctaaacaaaaagcatatttatgaaaacattgttgaaaagcgcagttctactgctcggaatgggattgctttctacccattcccaggctcagaaagtggtggttgaggataaagaaccgaattccgtcatgttcgtcacgatcgataaggcgggcaatgagattatccggatcatgaatgcgtcacagagtccccgtttccacgaaccgaaagcgccccgtttcctgctgacagaccggaaaggcaagtttgctctcggtatcggaggatatgtgaaactggcagccgaatatgattttggcggtatttccgataatatcgacttttacccggcattgattcccggcagaggacagtcgtatgtacggaaccagttccagatggacgccactacgagcacgatcttcctgaagctggtcgggcatacggatctcttgggcgatttcgtggtgtatacggccggtaacttccgcggtggaagcggcaagatattcgagttgaggaatgcttatgtgtcggcacgaggctttacggcgggttacgattatggttcgttcatggacttgggcaatgtgcctgccacgatcgactttgccggtcctaacgggatgtcgatctatcatgccacacagatccgttacgaacatgcgtttgccaaaggcttgaaagccggtatcggtgtggaaatgccggttgtggacgggctgacaaacgagtatgtcagtattgccaagcagcggatgccgaacttcccggtctacgtgcagtatggctggaaccctaaaagccatttccgggctgcggctattatcaggagcatgacctacgatgatttgacggcccgcaaagcggaatcggagatcggatggggtgttctggcttctgccacttttaacctgacgaatcgtttgcaggtctatggacagggtgtgtatggcaaaggtatcgggcagttcctgaacgacatgagcatgttgaatgtcgatgtggtcccgaatcctgaaaaagaagggaagatgcaggtgctcccgatgatgggctggtttgccggcatgcagtataatttctctccgaaagtgtttatcaccagtacatacgggcagtcacgcttgtatagccatgatggttatcctgttactgcttccgaccagtaccgctacggacaatacctgaacgccacgcttttctggaacatcacgtccgacctgcaggccggagccgaatatctgcgcggctggcgtacggatttcaacggtgacacacgtcatgcgaaccgggtgaatctggcggtacagtatagtttctaagaagattagagcctttaaatgatgatttatctgttacttttggcttgatccaaaagtaaccaaaagatcaaggcttaagctggctcgctactccgttcccttcgttcgctgtcgcgtctgaaactcgcttcgttcaaacagcagacgctccggacgctcactccagtctctgcgcttaacgctcacctgcttaggccggatatagagcctgacggctctttgaggatggccgataccatctgttatataggtgtcggccatcccaagagaaagcggagctttcttggaaaggcctaagcggacggttgtcaagcggagggtaaaggtggagcggccggagcctgcgctgtttgagcgaggcgagtttcgcaggcgacagcggaacctttgcccggagtagaccggacggttaagccttgactttttggttacttttgggtcaagccaaaagtaacagttattatcatagtgaacaataaaatccccacagtgaaacagagagcactgtggggattcttatttattggatctgatcttgttcgcttagaacaatttagcaggatattcgcctgcgtcgatcaatgcctggatcttatctaccacttcctgacggtcttccggataggtgacaccgaaccatttgctggcggtatccagtacttcgaccgtagccgtcttgtcattgatcaatttatcaaccatcagcggaatgaagaattcgctcttcaggttttccatgttcttcggatcgctcaggaaagtcttgaagaattcctggctgtaagcgaagtaatcaggagtgaagccccagaagttcatgcttaccggagtcgtgtcgggggtagctgtccattcgccgttgtcgtcgatgtatttcacttctccgtcgatacgctggattttagtacgttcgacaaccgaagtcaacaacttgtttgcatctgtactacagataccgcgtgataccgtaccgctttcgctcaatgtgttgcctacgcggaaacctaccatcgaatatacgttcttggaaccttcaggcagggcagccaggaatttgcccattgcctggaaagagtcgcgtccgtagaagtcatcgcagttgataacggcaaacggttctttgatcacgtcagctcccatcatgacggcatggttcgtgccccacggttttgtacgttctgccgggcaggtgaatccttcgggcaggttgtccaatgcctggaataccagttcgcaagggatgtgactttcatatttggagaggattttgtcgcgaaaatcctgttcgaaatctttacggataacgaaaacgagtttgccgaaaccggcgcgaatggcatcgtagatggaataatccatgattgtttcaccattaggacccagtccgtccaattgtttcaagcctccataacggcttcccattccggcagccaataagaataatgtaggtttcataatcttctaagtttatatagtgtttttgttttcttcgggcaaaagtaggaaataaatatgatttttgatttatgatttatgatttattcgtttactcctgacttgataccatagacaacactatgttcaatcataaatcatagcatcatttcacttccagtacgacgatagacttggcgggcaggtcgattttgagctgtcccttttcgattttcgcaccgtcgaaggttgccggttttacgacatccggtttctcgaaggtgttatggtcattgatggaggcggaggtcaggatacgtcctttcacgctgccgatcttttgtccttgcaggtcgagggtgatgctttgggcgttgtcgacatctacattggccaaagagatgtggatacgtccgttcttgtctttggaggcggaagcgcttaccatcggtacttctcggcctccgcgcactttggccttgtcgcagatcaagtccatcggcaggaaagtggcgtcctggtgcacgttatacatctggaaaacataataagtcggcgtgagcaacatcttcgggccgttcgtcaagatcatggattggagcacgttgacgatctgggcgatgttggtcatccggacgcggtcggtatatttatggaatacgttcaaagtgaggcctgccacgaaagcatcgcgcatggtgttctgctggtacaggtggccgttgatcgtgcccggctcttcgtcccaccaggttccccactcgtctaccatcaggccgatcttcttctgcgggtcgtatttgtccatgatctggatatgcttcctgacgacatcttctatttcgagacatttgcccattgtccagtaatagtcgtccttgttgaaatccgtagccgatcctttgcttccgttccatcccgtgaccgtgtaatagtgcagggagatgccatccatgcggccgccgacgttcttcatcagcgtctccgtccagttgtagtcgtagtcgctggctccgctggcaatcttgaaaaggcggttgccgtcgtagttgcggcaataggtggagtagcggcggtagaggtcggcgtagtattcggggcgcatgcttccgccacatccccaactttcgttgccgacaccgatgaatttgactttccatgctttgtcgcgtccgttttgccggcgcaggcgggccatcgggctgtcgccttccgaagtcatgtattcgacccacttggccatctcttcgacggtcccgctaccgacgttggcgctgatataaggttcgcaccctaacagttcgcagaggtttaggaactcgtgcgtaccgaaactgttgtcttcgatcgtgccgccccagttgttgttcaccattttcggacggttttctttcgggccgatgccgtccatccagtggtattcgtcggcgaagcagccgcccggccagcggaggttggggattttcagttctttcaaggcattcagcacgtcgttccgatagccttgtgtattgggtatttcggattcggggccgacccaaagcccgccatagatacaggtcccgaggtgttcggcgaactggccgtagatatgtttgctgatctgttggtttccttgctcaggatagatacggatgctcgcgtctttctgggcgaagaggggcagtgtggcggctgccattaggcttactaatactgttttcatgttattttcgtttactatgttttgtttgaatgaaagctatgtcatgatataaaattataggttataagtattttcctgaggacaaaagtatataaaatacacttatgaacgaaattataaaaagaaaaagatattactatttgcctcaatttgtgtacctttgtcggataaaatgaatgattaaacgttgaacaaaatgaaaaagttaatggtaataccgcttgttgccgccggaatggccgcaatggtggggtgcagcaaaactcctgtgaaggaggctgcaaagaatgacgctatcaacctggccaacctggacacggctgtggctccggggaccgatttctatcagtatgcttgtggtggctggatgaagaataatccgctgaaaccggaatatgcccgtttcggtacattcgaccagctcagggataacaatcaggaacagatccgtactcttatcgaaggtctcagtgagacacccgggcaggaggggagcgtcgggcagaagatcggtatgttgttcgcgatggggatggacagcgtgaaactgaatgaagacggttatgccccgatcaaagaccagcttgctgaaatcaacaagttaggaacgaaggacgaactgaccaagatggttgctaccttgcataaggaggggatggctcctttcttcgccttgtatgtcggagccgatgaaaagaacagttccatgaatatcgtacagttgtatcaggctggactgggtatgggagatcgcgattattacctgctggaagacgaaagcagccaaaaaatgcgcgaagcctataagaactatattacccgtttgtttaccctgatcggaagttctcccgaacaggccgatgccgccgtcaatgcgatcatgaagatagaaaggggcattgccgaagtttctttcagccgtgaagacctgcgcgattcccaaaagaactataataagatgtctatcgaaggtttcaaggccaagaacgatctgttaaactgggatgtttatttcgaaagtatggggatgatggatatcaaatatctggatgcgaaacagctctcgttctatgaaggtctgtctgccttgatgaagaatacgactttggatgaacagaaatattacctgacattcaacttgcttagctctgccgctccttacctgagcgatccgtttgtcgctgccgattttgatttctatgggaagacgatgtccggccgtcaagagcagcagccacgctggaaacgtgccctgtctacggtaaacggtgccctgtcggaggctgtcggccagatgtatgtggctaaatatttcccggcttcttccaaagaaaagatgttgaagatggtcggtgacttgcagaaagcgttgggtgaccgtatttccagcctggaatggatgagcgatgccactaaggcgaaggcgcaggagaaattggctgcttttatcgtcaagatcggctatcccgacacttggcgcgactacagcggtctggagatcaagaatgattcttattgggcgaacgtacgccgttccaatatctttgaggtcaattatatgttggcggatgtagacaaaccggtcgataagactcgttggggaatgagcccgcagacggtgaatgcctattacaacccgacaacgaacgagatttgtttccctgccgccatcctacaacctcctttcttcaatccggaagctgacgatgccgtgaactatggtgctatcggtgtcgtgatcggccacgaaatgactcacggattcgatgaccagggacgtaactatgacaaggaaggcaatctgagtgactggtggacagccgaagacgccgctctctttacgcaacgtgccgaccgtctggctcagcaatatagtgatatcattgttgtggacagcgttcatgccaacggacgtttcactttgggcgagaacattgccgatcagggggggctgatggtcgctcatttagcatatctcaattctctggaaggaaaagagacaccggtcccgatcgacggttttaccaatgaacagcgtttctatctgggctacgccaatctttgggcacagaacatccgtcccgaagaaatcctgcgtctgaccaagatcgacccgcactcattaggcaagtggcgtgtcaatgccgcccttcgcaacattgacgctttctacagcgcattcgatatcaaagaaggcgaaccgatgtatatgctgccggccgaccgggtagtgatctggtaaagtcccgacagttatattgtcattagaaatatcctgatgtaattcattttgcatcaggatatttgtatttaatacaaatcagttctgtttagccggcctgacaaacgaatgagagaagtaaaagtaaaattaatttatgtatctttgcatctttctttaacactttaacaatttaggataataagatgaaaaggctctttgtgctggcggctttgctggcgattgtttgttacgggaaagcgcaaaatgtgcagttacattatgatttcggaggtgctctttatgacaaggacttacatggccgtccggtgctgacctcgacggtggaaatgtttaaagcggataaatggggaagtacctatttttttgtcgacatggattataccagcaaaggagttgcagccggctattgggagattgcccgcgaactgcgtttctggcaacctcctttttccatacatgtcgaatataacgggggagcatcgaacagtttctcttataataacgcctatcttggcggtgcaacctatacctggaataatccggattttacgaaaggtttcacgcttaccgctatgtataaatatatccaaaaacatcgggaacccaacaacttccagttgacaggcacttggtatgttcattttgtcaagaacggtctttgcacgttcagcggtttcgccgactggtggagggaacggaccgattatgcggacggtagtcaccggaactttattttcttggccgaaccgcagttctgggtgaatcttaacaagctaaaacatgttgatgataagttcaagctgagtgtcggcagtgaggtagagttgagccagaatttcggcgcgcgtaaaggtttttatgccattccgacactggcgattaagtggtcattcgattaatcagattggaaatgctgaagaagttacttgggttcgacccacagacaatggcattgcgcacggagatcattgccgggattacgacgttcttgacaatgagttacattctggctgtcaatccctctatcctggcaacgacagggatggacaaaggcgctgtttttactgcaaccgctttggcttcggccctcgctaccttgctgctggcttttatggcaaagctgccttttgcccaggctcccagtatggcactgaacgcctttttcgcttttacgttggtgcagggcatgggatattcctggcagaccgctatgacggcgatgtttgtggagggggtgatctttatcctgattacgtttctgaacgtccgggaggtgatcttgaatagcataccgatgaacctgcgcttcgctatttcggcggggatcggcatgttcatcgcttttgtgggtttgaagaatgccggcatcatcgttccgaatccggcgactttcgtgatgttcggaccgttcactccggtttcggtcctggcgatggtggggattctgttgagcggtatcctggtcttgaggaaagtgaagggagcgttgttctacagcattctgatctgtacgttgatcggtattccgttaggagtgacggaatttccggatgggttcctgcctgtttccattcctcattcgatggcgccaacgttctgccagtttgatttcaatgagttttttacgttggatatggcaatcgttatctttaccttgctgtttatgaatatattcgatacggtcggtacactggtcggcctggcttcgaaaacaggcattatggacgaagacggacagattccccacgtaaaggaggcaatgatgtccgatgcgatcggtacgacggtcgggtccatgatgggaagttctacgattaccacctatgtggagagtgcttccggcattgcggaaggcggacgttcagggttcacttcgctggtgacgggtgtgttgtttttgcttgctttgttctttgctcccttgttcctgctgattccgagtgcggcaacgacgggggctttggtgctggtcggggtgtttatgatggattctatcacaaaagtcgatatggacgacatatccgaagcgcttccggcttttatcaccatgatcatgatggtactgacctattccattgccgacggaatggttttaggattgttgtgctatgtactggtcaagttaggatgcggcaaacataaggaggtaagccctaccatgtatgtgctggcagccctgttcatcttgaaatttatttttgcatgaatactctgtcagagtgtgtcgcgaagtaaccagaacatgtaaatcacatagaagagaatcaagacgaatccttccgtccgggatattttttgcccgcttttcaccagcggcaagagcaggatggatatgcccaacatgaccagtaggtcgatgtagtttacatttttggcctcgatgggatgtataagcgcgcaagagccggctatggtcagtatattgaataagtttgagccgacgatattcccgatggcaatatccgttttacgcttgtaagcggcaacaatggatgttgccagttccggcatacttgttccggctgcgacgatcgtaagcccgataaccgcttcgctcacaccaagctctttggcgatggaaacggcattgtccaccaataatcgagaggcaaataccaagacgaccagacccccgacgatggccagcgtatcgacagcccagtgcttaggctgttcttcgagttcctggctcgacccttctgttccatgtttgcgggagtagaagaggctgaatattgtataaatgataatacctgttagaaagaaaagcccttccgtccgccccaatgtcccgttccagaaaaggatggtgaacagtacggttgcggccagcatgaccgggatatcgattcggagtaattgcttttttacctgaagcgggcaaatggttgccgaaactcctaatatgactccaatattgaatatgttcgaacctacgatgtttccgatcgcaatatcgccttgtccgctgagcgtggcgttcaggcttactaccagttcgggggcgcttgtcccgaatgcaacgatggtcagaccgaccaccaaaggtgaaattttggctttgagagctaaagcggaactcccctgaactaaccaaccggcccctatgtaaagcgctaccagcgagagaatcaataacgtcaaacttgtaatcatagcccttttttccttattcgtttgttaatctattaaaatgtcttgcttcctgttatcccggcaaagaatatttgccgtaaccaagtaaacagcaagttgttttataggcagaaaaacgtacctcggaaaacctcgagatcaccacgaagtaaacaacaggaagctaatagacattcagttagggttgttaggaattattctttaatattcgtattcttcatccttcggactattggcttcctgccgcatatgaatgaaccgtaaagcaatcatcgctacactcagcacggcaagactacccattgttatctcttttaataacatattggagaagtcgcttgttccgattaataccaagataatgaatgacaacatcatagttgcatccacaagatctttatttattttcatgtctgtattttttaggctgtgaaacgatcttttatttttcggggctggctgtttcttccgttgtggaaggagtgctaagacctttcatgatgccatacaagcctacaccgagggctcccatgacgactaccagtttcagataatcgttcggaacgatggaactgcaagcgagtacacaaccgataatagtaataacgacataaatatagatactgaatttattctttttagtagacataattatttgattttttaagtgaataataaaattgttcgcatttcggaaaatgcaataaaagaaacggtatggaattcatatcccatacgaaatcagagattattcacttacgatcaaataatgattttccgcaggccatacacatggtatcccatgcggcaaaggagggttgaaaagttaatggtctgacatattgttacctcttcggatactttccggagaagattgatttctttcaagcgaaaatactggattgccttttcttcgatcttcagtaatcgtatgtttaaagtattgctgacattctggatgcttctgcgaggtgtcaggcaattgcaacctttcaagtcgctgctgagtatttccaggttatgctgcatgtcagctgttcctttttctatcataacagcctctttctgcacttgtaaatcaagtgtagtatcgttgttctgtacgtcttcgggtacaaaaagcaacattccgaatagtagggtcaatatgaatagaaaattcttcatgttgcaaagatatatgaattcttgcttaaaaaacaaatatgtgccctttttgtttttatttttgcatgcaaattatgctgaaaacagatatggaagataaaaaatctcttgctggggcttgggtggaggcggcacgtcccaggaccttgccggcctctgtcagtccggttttattggggtgcgcattggcctattatgacgggatgttcgatataacaccggcagtattgtgcctccttgtggctctcttcgcccagatagccagtaactttgcgaacgattatttcgattttaagaagggagctgaccgggaggaccggttagggccggagcgagcggtggcgcaaggctggatcactccgaaagccatgctggcaggtacgttcgtcatgttgggactggcttgcttgtccggtttgttgttgatctgttttgcggactggcggctgatatgggtgggacttgcgatcgccatatgtgtgctggcctattctgccggtccttttcctttggcttataacggactgggagatgtctgcgtattgttgttttacggggttataccggtttgtttcacctactatatacagacgttgagtttctccttgttgtctttcttgctatctgtggccttggggcttttgtctgtgaatatcttagttgtcaataattaccgggactacgtgcaggataaggctgcccgcaaacggacgacaatcgttttgttcggtcgccgtttcggtcgggtgttttatattttgaatgaatgtgtggcgtttctcttggttctcccgcttgttctggatgctccttggtggattctgtttttattcgggatcctgttcgccctttgcttttacacgacacgggaattgcttacactggaaggaagggcgttaaaccgtacattgggacatacggcacgcaatgtatttctttttgcggcagtcctttcccttttattcgtatatgtgggatcgagtctgtagccggactgccgtagattctctcttgcaagagtaagtaccgtcggcccgcacttatagttctgagagtctgcgatactttaatcgcaagctctcagaactataaacgtaagacgccgattgtaaggacttatttcgaaacctgaaaatgggccgctttcctgtataatttccgtaatgtgccctggatcgatttggacaggataatcatcgttacagcaatgatgataagcaggatgcctactgccagattgggggtgaaaggctcgctgaaaaccaatatcccgacacatacggcggtgataggttctacggcgcccaatacggcggtaagcgttccgccgatattgtgcacggcaagcacgagggtgatattcgagataactgtcggaacgatcgccaacagtatcagattgacaaatgacatgctgtcgggaatcggttgtatgccctggttagttcccgccttgatggcaaacagagccgtgctgacaacgaatacatagaaggtcagtttgcgtccgcccatctttagcctggaggttgatcccccggctaagaatttattgacggtcgtgatatagagcgcatatcccagggccgacagcagcacgatgaacacacctaatgcgctcagtcttatttcttcctcacctatcgaaagacgtgccaccccgcagattgccaatacgatcgccatcaaggtaatccaggatgtcttttccctgaaaaacaacagcatgataagtgttacgaataccggataggtgaaatgcagcgttgtggcgatccccgccgacataaaattgtatccccagaacaggaacatggcggaggccgtatagaaaaaacctaacaatattaataccggaatatctctcttgtccgcgtggaaagattctttctttgcggccataatacttgccagggccaatgccgcgaacaggaaacggtagaacaggatggaatcgaattgcattccttttgccatcaggggcaaggtaaacagcgggattaacccgaaggttgcggatgtcaagataccaaaggcaaatccttttaaattattcatcgtactgcgtattctttttgataaaactgatgcaaaggtagtcgaaacggacatttgcaccaaaatttgcgctcggtgtcttttatatggtatcggaatataaagggtaaaggaggacgatactccggtattgttacggaatgtttgcaattagtaaaagatggaaggtgccccaaaacagtcctgttctcacaccaaagatgggaataagggcttttaggacaccttctatcaatgtggactgatctttttcttacaaaagcaaccctgcggcaacctcttccgcaaccgcatcgttcttgatggctgcgaccagggcgaggccaaaattcatgactaatccggggcctttgctggttatcacattgtcggagacttcaacggcttcaccggtgacgttcgcaccgatcagcttcggttcaaaacccggatagcaggtcgccttgcggccctttaacaagccgagtccgcccaataccataggagcggcacagattgcagctacgatacggccttcgcggtattgtccgagcaatgcttctttgacggcctccgaatcgttcaggttcgatgcacccggcatgcctccggggagaatgagggcatcggcatcatttaacagggcattgttcaatgtcgtgtcggctgtgaccggaacattgtgtgcaccgatgacaaccggatcggttgtgatggaaacagttgtaacttcgattccaccgcgacgcagaatatcgacagtccccagggcttccatttcttcgaaaccgttcgctaagaatacaattgctttcttcatgatttatgatttatgaattatgatttataatttatgatttatcaactgctcataaatcataaattatttaagtttatacagataggtaatcgtaccactctggttgttcgctccgctgatgctgttgaacttggcgcgtttggccgcgtccagggcgctcttgcgcatggaaccgttgtcgatgttggtacctttgcctatttctgcaaatataacatttcctttcggatctaccgtaatgttgattacgattcgtccctcttcctggatcgtgtaagctgggcgtggtagacctcccgctccgatcgaacgtccgttcaggttgaacgaaccatatccgccaacaccttcattagccccgtggtcggaatttccgaacgggctaccctgattgccggttccggatccggcatctccctggctgttcccttcttggctgcctattccgaaagcacctgcgaccttgttgctgatggcctgttctttcttgcggcgttcttcggcaaggcgtttcttctcggcttcctccttgcggatgcgttctttttcagcctcctctttccgttttttctcttcttctttcttgcgttgctcttctttttcttttttcttctttgcttcttcgattgcgacgctttcttcgatctcctgcgtcaccagatcttccttaggagtttctaccttcggttccggaacgggagggggaggaggagtcgtttcttgtggaggttcctgtccggtatatttcggttcgaaagtcccggctgccgcattgacatttccgaagttcaccaatataccgccgtcttcatcgggaacgacggttttgagaaccgtgaatcccagaatcagcaggatgaacaggtggaatgccaccgaacccgctatgccatatatgtcatctttatttaacttcatgaattatgaattataatttatgatttatgaattctgatttatcatcgacgcatcaatcataaatcagaattcataaatctcaactatttttgtgatcgggtggcaagcaccatcttgaatttattctgatttgcgatgttcagaatacgtacgatttctttataagggaccgtctcgtctgcatacaaggctacaaacatttccggttcttttgcataactgtcttgcaggaatggggtgatctcttcgaaagatacctgtttttcccgctggttaccgaaagcgacatagtaattcagattcgcatcgatcgtgacacgcgtcagtggcttggctgcagtctgcttttgtgcctgtgggagcgtcaccttgatggcgttcggaatcacgacggtggaggtaaccataaagaaaatcaacagcaggaatatgacgtccgtcatggaagccatgctgaagctttcgtttacttttgttcttcgttttaaagccataactttttgagttatgatttatgatttgtgatttatgattgtatctgtgtcgggataaatcataaatcacaaatcataaatctttagtttgcaggttcattcaataagtccataaattccatcgtgcgggcttccatcttgtttaccacgttgtctacctgcgaaaccagatagttgtaggcaaacagggtgatgataccgacaaccaggccacctaccgttgttaccagcgcttcgtagataccgcccgacaataaggttacgtctacattcgttcctgcattagccatatcgaaaaaggcgcgaaccataccggttaccgtacctaagaaacccaacatgggagcgccggcggctgtcgtggcgatcagcgggaatcctttttcgagtttggcgatctccaggttacccacgttctcgatggcaaccagtacgtcgttcatcgggcgtcccaagcgggtgatacctttctcgatcatacgggcggaaggggtgttggtgcttcggcacaggttcagggccgaatcgaccttcccttcatggatgtaatctttgatgcggttcataaatgtttcatcctccttaccggcgcggcggatgaccatcaggcgctggataaatatataacatgccatcagcgacaatagcaataagacaaccataatccacccccctttaaaagccaggtcgattacattgatttcagcttccgtgggtgctgttaccgccgtgaggtccggcatctgttctgctgtttgtgcccctactgcctgcagggaaagtaaaatactcatatttgatttgtgatttgtgatttatgaattatctgttaattgtctattgtcaatagacgagacattctttatataaacggattgtttccttcagcccgtaatagagagcatcgctgatcaaggcatgaccgatggaaacttcatccagccccggaatgttttgatggaaataagccaaattttccaaactcaggtcatgaccggcatttatgcctaatcctaagtttttggcaagtccggcggcagagatgaaaggagcgattgcttcttcgcggtttacagggtagagggtcgcataaggttccgtgtataactcgatgcggtcggttcctgtcttggcagccagttcgatattctcaagatccgttccgacgaatatggaagtacggataccgtgtgaggtaaaagtttcgactaactcgctcaactggtcgaaatgggctttcacgtcccaacctgcatttgatgtgatggcatcgggagcatccggcactagtgtcacctgcgtcggttttactttcagaaccaggtctataaacttctcgcaaggataaccttctatgttaaactctgtttttatttccggtttcaaggcatacacatcgctgtatcggatatgacgttcgtccggtctgggatgaacggtaatcccttgtgcaccgaaagtttcacagtctaatgctacttttaatacgtttggtacattgccaccgcgtgcattgcgaatggttgcgaccttgttaatgtttacacttaaatttgtcatcgtatatcgttatatcttttttctttcattacatttgcacaaaagtatcggcaaatttagcagtatttagggaatatacagaagaatgttggtgaaagatttcataacgaaggaacttccggtgttaaaaagttttgacactggggaatacgcattagccttgatggatgattttaagttaaagcatctgccattgttaagcgaaaacatatatcggtgtctggtttcggaaaaagacctgttggcgatgcctgatccaactgctattatcggtgatccggttctgttttcaccgagtgttcaagaagatacccatatctatgaggcgttggcactggtcactcgctatcagttgagcctccttccggtcgtaagtacggagggagaatatcgcggggtcattacgcgcgataaactgatcgatatcctgtccgagctttgcaatgccgatacggccggaagtgtttttgtgctggaagtgatgccgcaggattattcgatgacggatatcgcccgtttgatcgaggcgaataatgcgcatatcttgagcctgctttcctatacggataagacgaccggacgattgcatctgattatcaaaatagatctggaagacgtctctcctgtgatccgtagttttgagcgttttaattatactgtcctctattatttcatggaaaaaggaatggtggacgacctgttgcagcagcggatggaagaattggtccgttatatgaacatataaacaattgacaattgataattgacaattagaaaaatacgaatcggggatgaagaaggttggaatatttggcagtgagtatcaggcggacaagcaacttgtgattaagcgtttgtttgaaaaactggcttctttggaggctgaggttttcgtggaccgtgacttttatctcttccttacggatgcattgaactatgaaccgccggtatcgggcatcttgacaagcgacgagtttgatttggatgtggcgttgagtctgggaggagacgggacattcctgcgtactgccgccagggtgaataagcaggatatccccattttgggcatcaataccggccgcctcggttttctggcggatgtggcgagcaatgatattgaagatacactggacgaattatttaaaaactactataagacggaagaacgtactttattgcgccttcatacggaagaccgggtgtttcacggttataattatgccttgaatgagattgcgatcctgaagcgggacacctcttccatggttacgatccatacggcgcttaacggggaatatctgacgtcttatcaggctgatggtttagtcatttctacaccgacaggttcgacggcctattcgatgagtgtgaacggtccgattatcattccgcaaagtaagaatttggtgttgagtccggtcgcacctcattcgttgaatgtccgtccgctggtaattccggattcctttacgatcaccctgggagtggaaagccggaacaaatattttctgatcgcccttgatgggcgttccgagatattcccgaccggcatacagctgcgggtgagtaaagccgattatacgaccaaggtgatcaaacgatataaccatactttttatcagactctccgtgaaaaactcatgtggggagccgatacgaggatgaaataggccttcctctcccttgtgttatcgtgtgtccgatactccgtttgttgctagcggaagcgtgaaccagaatgtggaaccttttcctaaagtggagcagacaccgatattaccacctagtttttctatgatgcttttactgatggatagtccgagacccgttccttgcttgtgggcattcagtttgacaaaacggtcgaatatgtttttgcatgcttcttcgctgattccgatgccggtatctgttacggatacatatatcttattttctttcaatcggtaatccagtttgatttcgccattggatgtgaatttgattgcattggtcaggaaattggagattacctgtgtgagccgtttcggatcggagttaagtttgacggagggtaagtcccggttgaaagagaagcgtacatgatccggtatttttaaggtatggacggcatagatctcctcgcaaatttctttgaagtcgaacttcttcagatgaatgtcgaatgtgctggcttctatttttgagaaatcgagaatatcgttgatcagctgtaagagcaggtcgctgttcttgttcagccgcatgcagtttctcccgtatatttatttcattcgtggtatcgatcaaattgccttctttgtcgtatagctcgatacctatcggaagcttctggtaaatattttccaggttcagctcttttttcaaagggttgtgtgtaggaaaatgaggcatatccgtttttttgcatatgatgtctattgtgttgcatataaaacattaatctattgcatataagatcctaacgccaatttcaaaacagatctgttttttcttttgttccgtctcttgtgatcttttgtatatttcgtttattggtttgtttatttatgataaaagttatgataatcatgtgatttcgtaaaacattgtaaaattagggaatataaatggattgttattcttgatactcggataaagttatgcgaatatgctgtttttgtatacaaagccggaactggaggttctcgaagaagctaaatgtgtatctaaaattatgttttgtagcatgattttgttaaacatggttaagtaaatgaattttccaagtaaaaatgtatgctacataacataaagttcatatatttgcactgtgtttttcatggtattagatttaaggttaacaatgaagattggctgtccgtgaggatagccttttttttgttttaacatttggcataaaatgaaattttcgtaagatactgattattaattaagtgaaaaaatgtggtaaaacaattttaagacgtttaccacccagatttatccaaaaaccaagcccatgtaccctgctatgtaggtaacttagttgaattaacatgaactaagacgtgggcataaacaactaattaacatgtttagtatcaaagtaaaagcaaggccaattaaaggaagaagtaaagaagtgagattggaattggtcttttttaaaaccggatttcctcgtgttccgaaggtttttaacattattggagaggcaaaacgctgggattcagcatcccaattatttaaggggaatgactctctgactgctcagaaaaacgaattaatcttaaaagaaaagaaaaagtatttagatgttgcagagctatgggaatccgaaaaaatcaattggactcctaaaatgtggtctcattgtttcgatgttgaggcagaagttaagagtaatgattctccgacagtatcggtagttgaagtgatagactcaatgatcttattattcaagacaaagagacgtgtcaagaatggtgttgtagttacgagcagcaataatgcggaaaattatttgtggatgaaaagagcgtttatggaatttacattaagaaaatactccaagaaattttcttctttttattttcaccacataacagaaaagtttctgagcgattttgtaaattatacattgagacgtgcaaagcttaaaaatgcaaacagccaaggtggtcttcctcataaattaggtctgcttcgtgccgtttttagatatgcctataaacgtaatatgtatggtgttaatctgggagtatttgattcggtacaagaatacatgcaggagaaacagccggaaccaaaaacgatttctcccaaatccattgtccgtatagaaaacatgagtaggagagattttactcctaaagaatgcttctatattgatttgtttctcttcagttattatactggtggaatggcaaacgtggatgtgtgtcatttgacgaaagattgcataaaagaaaatcagatcatttatgagcgcagaaaagtgaacaagaaggctactccttttcttacagacaaggctcgtataatcatcaataaatacaaggatgaagctttgggtgattatgtatttcctattttcaaaatcaagcacaatactgaagaaaagaaacacatgagggttaaagtaatcagcatgaacgtgaataagacactgaagaaggtaagggaaaaactgaaaataaaggatgaaatcacctggtattcggctcgtggaacctttatctcgaaaatgatagacgagggattccatcctatgcaagtagcccagtttgccggaaacagtcctgacatgatttatcgtcattattataagaatacagatccgaaatcaacgctggagagcttgaaccggatattttaagagaataaagaacctgtcttcagtggcaaattaaatctggagacaggtttgtgaaataattaaaatatcattttaaatagtttgtatgttatttatttgttatacatttgtgatataaatgataataatctatggaagcaacagtaaagaaacaaacagccttcagatttgacagtgagttgttggatttattaaagagtgcggctaaacgtgagcatagaagtttgaataattatgtagagtgtcttttgcgagaagccatgtacagagaaccaaatgaagaaaccaagatggctattgaggaagcacgttcgggaaaatatgctggaacgatagatatgagtagttttgattcttttgtgaaatctgtgaatgatatagaatgaagacaattcattatagtaccaaggcaaagaaagatttaaagaaatatcggaataatattcggctaatggaggctttgtatgaagttctgagtagcttggtcaaaggagaagctgttcaggaaaagtataagccgcatgaacttacaggaaattataaaggctgcatggaatgtcatgtcggaaatgattttcttttaatatggatagatacaaagcaggatgtgatagaggtaatcagattagacagtcattctgaactttttaaataaacaaagccgttagggaagagatactatttattcccaacggctttttgtatatggcttatgtaagaaaatcaaaataaaagcctaccccaaagaagttgtatgaatgaaatgaacatgaattgagttggggtaggctaaaagtagacctatgaagttttagagttctttataagaacgtgactaaaactctgtttattgtacaagcgttgaaaattatgcttgtaaagcgagtttgggttataatcaaagtgctcccaacagaagccctacagccccccaaacaaggtcgtgccactcttcagttccgttcttcaaccacttgtcccaaacaatctctttcgcaacaagtatcaccaaagtagttaagattgccgcttcaaccggcataaggtatttgagcatgtcataaatcaatattccggcaatcaaatgctgtgcgccatccattctcattttattgatgcagaaatcgtctatcttctgcctgattctttttagataatccattttgataaagaatttaattgctgttgtttattttaagatattgcagccatccggaaaacaacagtctgttttctatgtagttgcagttcagttcgcaggaatatgcctcttgttcaaatgacacttttttgtatgcggtttttgaatttcgataaacgagcaattttataaaccactctatcgcataccagatataaaaggcaagagcagctacgatataccatataggcgatatatcaaaaatcaattgtagaattaacaccacacaagccgcaacacaggtcgtttctatccattgatatgaatggcaggtttcatggttcctgactctttgcgttatatgctccggagataacttgcttaatacaaacgggccaattgtgattgtgtggcaagaactgaatgccaataatatcttggcgattcggttgtcgtaataaaatcttttcatatctgccaggggtttttgtatggatcataagatgtctggaatgtcgccatctgccagtctgtaaccggcttgttgtcttctgctatttttcgtggaatctgagggttgattttcagcttagaagcatcattaagccacttcatggaatcctcataatctctcattctaacaacactgacgttattgggagcaatcagtttggtaagctcgtacacagccaaccgaatcatgtgctttttgagattgtagtttctgggatcgtgtagtgcaagattttccccgataaccggactgtcactgttcacgtctatttcaggataatacacttggccatcatatacaacgtactcatgtgatgaaagttcgtattcgttgtactgaggatcataatcggcaatagcaccccagttttccgattccaaagggtttttattattgtcgaacccctccagtgacatcaaagtataataggaaccgtcaaattttacgacattccaaagctcgtactcaatcggattccagtctgtatattcagcaagtttccatccgtttaccatcgggattcgtatattcccaaatttccatccattttcaacaagacagatataaggcgtatcgttatataagacaatattacctttgtaataggttttgaactggctgtatcgttgaaattcccgtatctcgcctttctcatccacaaactcttcccagtattccacggaagaaggagccttgtatccgctgatcgatcttattatctcgtggattttaccatcaaaataaatatgtgctccgatcggataagttacctttcggtcgtattcagcgatatatttccctttattcagttctttttcaatctcatagttctcactcagatactctatgacactcatttctgcggcttcctcggcttgaatgaatgtttccggttcgtttctcgttatctgggaaaggctgtcttgcgtgatgattcccagataatcgctattgtttaaaaatcgtctgtacatagattaatggttcgttaatagttaaatccttcgttaatggtagctgtggaaaggatggtcatagaaccgtcccctcttttgtatttcgtccagctatcccttaaataatagcatagcaggtaatcaaggcagtcggacaagtggccgtatttttcgtattttacgcctgttttagcgtctgtaacctttgccttgcactttgtaccatcctcgttctttaactggtaaataaggtcttctgtgagcttcctgcaacgtaaatcaatcatcagtttccatccgtcaaatccctcgaacacctcattgacaaattcacatcgggtaacttgtggaggctgcttttttaagagcttgatcttaggtttcaatacgcccttgcccagtgtttccgtgatgatggtgtagttgtttgtcccatcttcatttgtggttgaacgctgtaatccggcagggtctcctgtcacgtccacccctccgatatgtttttccctatacaatttctgttgtatcttccttgccagagccggagtattgttttccttcttttccggcaatcccaatatttcctctatgacatatatctcttttttgtcatagtttatctgagccaacaaagtagacattctgggtgcgacattgaagtcccagatggtaatgataggtttggtcggatcgtagaccttttccttcaggttcgttataagatgtctggaaccgtcaaaattgtggtaaacggccatatcgttggcttccacgaaatcccagttaccatataacaaacgctcctttgtggcttggtcacgaatcttgttcaatgccgcctcgtaagtctgccggaaagcgatgtccgggttgtcgaatacggagaacggtatataagcctctccctcccggcattccaccttgtctccgttttcatcctgtacgaaccgggaacgtacccagtttgtagtcgggttggtgctcataaacattctggatgtcttgaatgtctcgtgtattctccaacgaagacgggaaaaaagcacttcaaccgccttttccgaaatctccgacacctcgtcgatcatggcaatcgtatattcggaagaaccgaatcgctcgaagttcgggtcagaaggcagatcgaccatttccttcatgataatgacagagtcgttccaaaaggtaagcgtaccttccagattattgattctgtagttcacttcttcttttaatccccagttttttagaaccgtcttgatcgtattccaagtagattccttcaaagacttgattgtcttacgtgccacgaccgcacggatgttctcaaatctcatgcaggaaataatgagccaacaggctcccaaaaacgattttccaccacctgctgatccaccacctaatatcatttgtggcagatttgtgtttccacatgactcgcaaacaggcttgtattgtggattcttttttacatcgtatccgatgagtttctgtgttatatgaccgccacatttgggacaataatccggttgaagcaatttccatagttcatattgcctttctgacggtctgaaatcaattttaatgttctggggtggtctcagttttgcataaattcccatgtttagatatttgcagcggcaatcgtaatgacagaaaccgccatgattataagtatgttgtttagaattatctttctcatagtctggtcttatatggaaacagcacccaactttttagggctggatgctgtttcggaagtgttcttatgaaatatgaattttaatttctcgctctttctttaaaatctcattcaaggcatccgaagtggctcttgattccagcaccttgccttttaccttgtttttcccaacaagaatgcaccctgcgctatcggcagcggtgtttccgggatgtattaggattccaataaaatgcggcacatcatgcaatcttggtaagacacgtttgaatctgggtgagtattccattgtgaccttgtattctccagatgggatagcggtttttgaataaaccttttccggacattcgcaattcaatcctttgggcgtgttcggacagtatgccggaagttctcttaccttgtcttccagagtatcgcagaaatattttccgtcaatgtataaacgcccgattgtataagtcgctcctttgaaaattcttttcagttgcagtaacattttggtttcggtttaaaaatgaacaatatgtgattttgtttttaattaagaatagtggtgtctggtaggggatggttataaaaaaggggcatacctttaattaggcatacccctttaatgcaaaagatttgtttgtatagaactattttttgttcaggtcaaaagacaacttgatcggatttttcaagaagtttgcttcgcccaccatagcctccgttgctgtaaggctgaattttaaattcttgtctttaactgcaaatacgccgttctcttcagcttcaattgacactgcaactttcagcttcaaatctacaaaatcaaaaagcaattgttccggggacagttccaaagaaattgagtcgtttgtcgcattcatggtagccttataatcagcagcataactcatagttccgattttctcgataataccagcagcagcatcctttccaatgatttcttctactaatactccgtacgggaactcggcaaaagaaatgcgatcattttccacgctcagattaactcccaccgtatcttgggcagaaaccgcataagtcatattccctgcatattcaccgttcacatcctctactgtaggcaattgaacatcatcatcgtcacaagaagtaaatatcaaaccaaatactgtcagcatcatcagcactgaccatttcaatgtctttttcatttttaattgctttagaatattaataaatagttttcgtaaagtatggatgtcgagtatttatgaaatgctgcatgagtgtcttatttttatatttctcgaaaataaaatatgtatgtcgtagaaaaaatctacaatgttccacacttttgtttcataaatacacagttcttaattgttgtaagtaattatatgtaattgatttgtagtttgttatattgttttcagaaaattggcatattagttgtataaaatttagaaagattgtttaggcataggcactatttttttattttcttgacacggatgtcgtttgcacatcatttatcgcattacttaggattagtagagtatttgtttttttcatttatcaaaagagaggccgcttgcgaaggtggtctctctttatttttatattcagtcaagcagatttgtttggtgctttgattattctacaaagccagatttttgttggtttcaatgaaattttaagtatggtttgctttaattaagggtaagtatgtttgtttacgtgggtttctcgctatctttgtacaaaacaacaattctttttagtgtatttgtttttattttgaaatagtatttgtttttaggagcaacctgtgaaggtagcttctaaatgtcttgcaattaataaaaacacttatggcataaaaaaatttattaccctttaaggagccacttgtgaaagccgttcctttttattttcgtatttaaacagaatatttcaaatcggtatattgttggtttaaatacaaacaggaagatattttcattcagagtagggttaaatgtttgttatattcatatatttgtgcattattttctaagagggagagatttttcataaaggcgttagccgaaaaattcgtttttttcatatcaaaaaagagctatctgtgaagaacgctcttttttgatttaattacatctttggtataaaaagagaggcagctaaaacaccgcctctctctgtatcaggttttcagaaacatatcctctgacctttcttctaagttccctcagacttttgctgtaagaggtcggaataatggaaccgtcataaatatctcttgcgtaataccgtcctgtttctgcgttccggaaagggaaacaatatccgttttcccaacgcctgtcccatatttgctgttccatattggacggcttatgactggatcaatcggttaagctgttccgcttgtttgtctgctttgtttttaagttcttgaagagcgatattttccacagacaggcttttgatttttgcatcgttttcttccattttctttgaaactccgctactgatattctttagcttgcttaccgcatcggtaaaaagtttggttgcttctgccagttggcttgcaaatgactgaggtttttcgatctcttgggttttggttcgcccacttaattttgaaaacatagtttttagtctttgatttttatatactctgaatatttgatttccacgtatggattgtcacttgaaatagtctggtgtatcgctttcactttccatctccaccaaaggaacttgtgcttgtattcgatccagaacgcctgattaagagtaacgggcagattgattttccccgtcagcctgtcgttctcaataatcccgttgattttcaaatacggggtatccatctttacagcctttaagaaaactggaacggtatctcttatcatcacactgtcctttatttccgcatcaatgggagcatccacttccacattgtgtttcgctgtcgcttccagatcctttattcttatccccagtttctttattttttcttcatcttcagccctgaaccgtttgtattcatccaaagacatggttagtgttttgatgtccagtgccatcgttgaagaatcagcctgtattcgccggacttccgacataagagcttcagtattggacttataactgtctttttcttcgatgagtctttggcgtgatcttagaagtgagattgtgatacctgaaagaacagcgataatcaagaaggagtatttattcatcagcctttggtataaacactccttcttgggttatacatcccacgcaactggtaacaaacccttcaggagccagttgccagttttttgcccattcctccacaacggtcgtcttgtgcggacaattaccgaatcttgattcgacataggtatacgggtgcgtcattttgctatgctcgtccgggaattgcgcttttatcttcacatcctctttccactgtggcattctgatataaccggctttcttttcctgaagcatgtagtaggcgagggggtaaggaagcgtattgcaggacatgtatttcttcttttcgaaatcagattggctgatccaccccatgtgcccggattcatctttgataagatagccttcttccagcgaatcctcttcttttccaagcatctttttcataaactctttcttggtcatttcctcgacctcgatacattctactcttacaaatttttccattgttatgtaaattataaagttttgattgactgactggggatgaaccattcatcttcttcttgaaacggctctgtaaattctacaatgtatcccggattttttctttgcgattggtcaagcgattcgatgatacgccccattcgaccaatcaatccttccagttttaatttccttaattcttttgaatcaacaatttcaattatctgattaatcatcggtttgtttatttaacgtatagaagttcaaactcatcctttctcctttgtctgatagaggaaatcactttatttttatatctgcaaaatgaaacgtattctttatagaaatccctgtttccgcttcttatttttcgtataagccggctggctggtttgtttttatatcctaagatattatattctcctacattataagccaacactccaagaatcaaagaatcctttccatattttctgaacacgctgcatttttgtagtaggtcttttcttagaagagaatcagcaaactcttcagaaatatcatgattgaaagtgtcacttttcaataatctgtgaccgtatccgacatagtatttgtgtcgccggtcatgccatccttctttttgcttaatcagttctaccgccatgtcaaatttggaaattttgttttccgttttatgttttggaatagaagcggtactgttacaatccggctctactgtaatagaaaagaagaacagggtcaaaataaaaacttttatcttcaatatattatcggtttttggttataatttactctgtatattatcgcatatttagtttgttattttacgggttaatttttattataaacactcgacaaaaataacaataaaaaaaagaaccacaaagcaaatgcggttctttttggcggcttatcgggaatttttcaagatttccttaatatcccttctcatctcttttaaatcgtcctgcatggacgtaaactgttgcatggtagcttcaaatacggtcttatccaccttgattgcatcaatcttctgatattggtcttccagtttggattcaatacgatcacacctgtctgccagtgaatctattctggcggtattattgaggtgttggacgtacatcgaaatcaggaaagaagcgacaatcgtaagggatttgatattgtcgcttatgaatgttctgatttgtggcataggtcattcaagcgttagaaggactgacaatgctttggaaacggattctatcagcctaaccgccgcttccgaatccctcagtccgtataatgccagaatgattatgatggccatgtaaacatttctttccgtccgtttagctttcgtgcctttcttcttctccattgttttctttctgaggaactataacattaaagatgataccattatcgccacctccttcgatcttcagttttgcttcctgggcgtgtttgatcgggtacagatccatcagtgcttttgccgcattgactgccacggcccgaagtggagccggggacaagtccattccccatttgtccttgtatttggcggtggaagtttcttccatcaccgctttgagagtttcggtaacttgtaactttacagcgatagcctccgtatcggtttgctgttgttcacttaatttcttgatacgttccgagatatgaggtttgccaagcagccgcctgctttttagactgacacctgaaccggaatcctgaaatgcttccctatagcatttacagtgctgtcctgcaaattccctcccaccgtttatatacaggtcgcagaacaggctttccgctttcgtcagtcccagttcgttctttagcatctcggacgcagataccttattttcctttttcatagaattgatattattaaagcccaacatagaacaggttgtgtcatgtcgggcttttattaagaatagggtgtttgttatgtatcggtttgttcttttccactggtcacagctgccatctgttctttcgctatatcgggtttcagggagatgagttgctccatcagtgcttggtaaaagacatcggccaaagcatcggcacaggcttccgcatctgccagcgagttgataagacgcatattgaaagacacatccagatcgtatccggtaatagccgccatcatctcgtttccgtcatatccgagaaccccgtatctcatcctttcgtcttttctgaacgatacggtttcattttcttccgtcatacatttagattttaaagtgtgttcttgatttttcctttttctgaagtcctgcacccgtagatgatccgtctgaatttctcagtcggttggaacagacgattgccacgttaagagtagcggtaacatccgcatccgcatcatgggcatcgtccaattcgataccgagtcgttctgccagcagttccagtttgtacgatgtcacttccggatcaccggcaaatgtgagcttgcctaagtctatcgtgtctacataatgaggctggaagttcccccaaaagtcagtgattccggcaaaaaccttggcaaattccttcagtttgcctccataggccataagttgctgaaggaaaccgcagtcaaaaacaatgttctgcccgataagaaacggctttgcggtctttgatttggaaagggtgtttcttgtggcgaaatcaatcacgtcacttgccacctgttcgacatcaactcctttttcatacaacatatccattgaaatatccgagtaggtaagagcagcttcctcatatttcatcagttgcccttcctcttcctcgatttcccttttgtttttcagaaccttctttcgtgtcttgcccaaaatatcgctcttgtgtttataggggtagatataattcatgtaagtgtctataacctcccatgtatcgagccgtaccgctttcattgcaatctgggtacaagctccgttttgtgggtctaaatccccggtttcaaaatcgagtacaatcccgacaaaaacggtcggttcgctttttggtgctgccataattaaagttttagtttataatttattgatttcacttaatattttattctcaaactcttctattgtcccatcattgatgatgatacaatcataaaaactatcgtttatgtgaatacgtcttttgtccctcgctaatctgtccggctcgatccctcttttaatgagcgtttcttccgagcatttcactgcgacagggacaatgaggtatctgttcccgaaatccttgacaagacattccagtcctgcctcgtcaattacataggtacaaattccacctttaggaacctggctgtggagagcgaaatactgttcacctccgaataccgtgtatgccagcatatcgtccccttccggcacttgttcgcttccaataaagaaatgttccacgccatcggtttcaccgggtcttttgcgtctggtcgtgtatgacacgatagtcggaatgttcattttctttctaaggaactcggccatataggttttaccgcttcccgatcttccaacgatggcaataattacaggtttcattcagtttctctttctataagcatgttgtttaattttatatggttagtaattcacttgattacaattctcagacattgaacagcatggaagacttgtatgtctgcaagcaatgacaaccggaatagtcgctgtatttaattatagctgacacgataatcattttgttctttgactgaataactttatcacgattcgccttgtagaaatcatcccacatcaccagttcgataatatcgttattctgttgcagtttcagtttgcagaaagttttcttctcgcctgttttcttgtcctgatattccacttcgtcatgttccagaacggttgcgcatacggctatccgtttaccctcgctttctttaagaaaagcatccttgattgtcatataggaagcccttccccttatatgctgcttggcttccgaattgtcatatattctcctgtaatcaacggaaccgatacctgatacttcgatctgaagcattgaccagaaatagtgtttgtctgtcatgtcggatggaaaatcctcttctttcagatcaaaccccaattctttggctgctacacaaagaatcctgtatctttccggaagcgacttgacgttttcaatcttatcgaagcatcctgccagaataaggtgtttcacgtgccgggcgtttaccggtacttttcttgtttcttcctcgttatctggatcatcccagtattcgtactttttaagtttgtacttgaatatgcggtggatgaaattctcgatggatgtaaatgccccgttcttctgacgctcttccactatgtactcaacggtcttgacaccaaccatcttgattcgtgtaagtgaccagaaaatttcatcattctggtagtcggtaaagaattgcacatcggaaacgttaatatccggatgcacgattttagccttgctgcattgttccatttccgacatgagagaaggtatttccttgtcgtctgcccactggagggcgatggtatagaaagctgaagggtagttggccttcagccatgctccacaataggctgttaatgcgtaggctgctgcgtgggagcggttgaagctatactttcctgctgtttcaattttgtgccaaatgtcttctgcctcataatccggacatccgtttgcaacagcccctttgataaaatcgtcttttaatgtagccattaagtctgccttctttttaccgatagccttacgcaaatagtctgttttacccaaatcaaatccggctaaagtatgagcaactaacatgaattgttcttggtagcacataattccgaaagtatttttggttgcctcatacgttccataattatataccggagtcgcttcattgtgtttatatcgcacataatcgtcagtcgccccgatttcaagcgttgccggacgatataaggcattgatagcaataaggtcttcaatattatcaggctttacttccataataaattttgtaataccacgggaagcgaattggaagacattctgggtatatccgtctgaaagaatcttatatgtattcggatcgttaagttcgttttgagtgatactctcaatggaataatgcttgttgtattccttgtttacaatattgataatggagcttagtttcgacaattccttggtcgccaacacatcctctttaagcaatccgatttcatccgctgcatatccatcgaactccgataccaataacccatccatttttcgtataggaagaaaatcaaaacattccacgtctttttcgttatttcttgtttccggagtaacaatgatagctgaagcatgaatggatgaagccttgggttgccccatcaatgtccgaatgtcttcaatgaccataggatagtcttggatgaacttgtttacctttttgtttgtcgcagctactttgaacaggtctgtccagtccattttgtcgtcctcaaagattgcagtaatatagtttacaatggcgtgcggaaccctatgaaccctcgccacatcctttaaaatagcctttaacttcaaagtagtaaaggttccggcagagaacacacgttgtttgccattgatattgtacctctcttccaaatactctttcatttcctgcctccggtcggaagcatagtctacgtctatatccgactcacggaagggcggaatgaccgcccctcttcaatccctttccgacaaaaagatcaacgactgacgttgtctctttggctttctttaattttacgtttaaaactttcatttgtcaagatttgatgtattattgaatttcgtttaaagtccagattaaatccttattgtcaaatataatgtcgtcttcaggttgtaattcatcggcatacacggtcatttcttcatcaccacgttttactctgatttcagcatcccttgaaacctttagtgttttgccttccagttctaattccacataatcttcaccgaagagaacatctatgtcttctcctatgatagtgatattgtcattccattggagtccgcatcgttccggtactaagaatcggctgaagatcaaatcatattttaacgggtcaatggaaataatgccaagcagataagatactaaggagcctcctgccgagccacgaccgatacccgtaacgattcctcgttttcttgcttcgttgaccatatcccactgtacaagaaaataatccacattgttggtggattcgatgatatatatttcttcttcaagtcttttgcgatacctctcatgttcttccactggtattttggaaatcaatccttcttccaataattctaaaaacatggtatgtctgtctccatatttatttatttcatccgggagcatgatgtattccggcatgaacatttttcctgtctcaaatcgtgccgtagctttctccgctatttccacggtcggctggcacataagttccaagagagcttccgcatcccatttctcagaatcaaatatagactgaaacattgctaaatgctcgtctatatccttgaaatactggtcgtcactctggttgtgagccgcctttgttgcaatcttgttcagaataatcttgttcttcgcatcgtccttatcaagatagtagttgtcacagataagaatcggctccacctcaaatattccctcgtcctccaagaaaaagttatcgaaatagaacttggtggcattaagaatttcaatatcaattctctctgccttgtattcgcttagatcaacctgatagaacatcatatcaaatgttctttccagttcttttacgacattcatgttctttttcatccagaacgaagaaagtttaccgaataccaatacgtttccttcgccgtgagtcaaaagctgggaaagcgtcagtacgttctcttctgaatccaccatgatttccttttgaatgcgaagaagattgcgaagccctttttgcgatagggaatataccttcatatccactttctcatcatagaactgtagagtgaacgaatagccgaatacgtgttttatcccggccttgtcacattccttttgtagattgaaggttgccgccatcgtattgcgatcacagattccgatagccgtatgaccgagatatttggctttcttgacccataaacccaaatcccctgagccgttcaataattcataaggggtatgtactcccaggttgacaaagggaatatcggtctttacagcctgtcgtttgcctatatatttcaatatgttgaatttgaactcttccctcaaatcataataataccagttgtcaccgaacttgaatgcgacataatagatgtcttcttccatcagaactgaaggatcttccatgagattgaaagacacttcatcatcctttaccttaaagatggattttacaccgctaaggtcggccaaaaacattttgccgaagtcctcgatctctatgacttcattgtctatcattttaaatgatattttattggcatcaagccactctgttaattcttccattggttaaagtgtatttaatttaaattcaataggggagagcaagttctgggagaaggtatcgtaggtttcccaaaacgacatttcatcccagtctttcccattctctgcgtcaattttggcaatgaatacgttgaaatattcattaagggtgctcgctgccttatttatagcttccgttgcatccgagtcatacccaagcacaacggttttcactcctttgcattgcagcttgtatatctgtatctgggaaatcttctttccgaaagtcgctacaacggctacgtgagggttgtcatacaactccagtttccgtgtcagggcaatgacatcgaagattccttccactatgataaccgtgtcggtctcatcttcaatgaccgcatcgtagttgtacaggagtttcacaaaatcgttttctatcgagttcctgtagcgcagaatcctgtattccccgttaatctttgccttgcagttatgccggtctatctcgtcctttgaccagatatgacgggaaacatagccaacggtatcgccatcgtcaatgatcgggaatatcacatagtcgttgaacttgaaattcagtcctcttgtcgtaccgaccggaaaatactcataatcatcaaaagtaaagcctctggatttcaagtacgaattggtataacaacgcttgtaacattccgggagttctatgatgcttaatgaatcatcaatctctttctcgccatcaatgcggaaaaggagctggacctccagttttgcttccagatcggcagtaggagagaccatcagatccggccttccgattgtttccaacagtccttccagcgttgtcgtggaaaagccgcaactgaaacaatgtgacataaacggctttttccgttccgtttctttgcctacataaattccgaacttattctcttttccacaatggggacattttggtacaataagattcttatggcttccatcgaattttgctcccagttccagacttatttccttgatgagataatctttctctgctttggttaaatccatgtatacagtcttggttaaatattttagcttaatcggctatattgtagtcacgtaaattggtgcaaaaatattatattaattggtacaaaacaagaaaatgcctataacattcttcagttatagacatttttacctctttatgaggcagaccgggccttcaagctcatggttcttcttgcatcatagaacacttcgtttgcatagtcagtggcaatcttgaacgtgtctcctttgctaaagaatcgggactttgcgatatgcagacgcatcgtatcctcttttctttccgcttcggattggttcagcgtaatcagatgggtaagtggtctggaaagcccctttgcttcagaacagttgtattcggtcagaacatttttctcatcgttgagccaatccctgttctcgatggtcgcctgataggtaacgaccatccagacattctcatcgttggccaagtctttcaaatcgtttgccactgcgatacgtttggcacgttcatggtcagctccccagtttcttccgcttgaatcggtaagcaagtccatcgaatccacaatcacgatgtcgggattgtgaccatgtatcttacgatattcggcaataccgctctgaatatcgacggttgatacgttgttattgaatctgggaaaggctcttacaataatacttccggtataggctttcatctgttcctcaaaaatcctcatttccgtatctgagatttttcctttctcaaaaagaaacgagttcttgcatattaaagctccggaataagcatctaccacttcttcctcagaaccctccaactgaaaatgaagcacgttcaatccatcatccaccatagcccttactccgacatggcgtgcgatatgcgactttcccacacccgtactggcaaggaaacaggtaagctgtcctctgagatttcttccatcgttcagttcgtctatatcgtcaatgaagaaacgtgtcacctgtgcaagccgtgagttcttgttctcattctccctttgtcggttctgtaggaaacgctgggtgaatgtcttggtaatatccacgaactgacttgcttttagtgtgaactgaccgagccattccgcatattccatcagtttgttctgagccttttcctgttcgttctgattgtatagctttccaacttccacataaacggcctgtagccggacgcttttgatgtatgattccagcatatccaacacggaatccacttttctgacaccttcatagtcctgaaacgtattaatcagttccgtggcatcgtagtctccggcaaaggcttgcaacaagaccgggtaggaaggcggtgtcttgtaggtttcataatgcttggctatgaccttgtttatcgcttgaaagtatttatccggcagatattcttttttcatgttttgcactactgcggcacatacgttgtcatacttcattacgcaatagtatagctcaaagaggaaatctaaacttaaagggttggatttatttggtttcattttgattaaattcttcagttctgattcgatatagttcaggataagcttgccgggttctttgtttacaggcttcggctttggcacattgttggcaggagacggaaaacggagtccatagcagggtggattgtccgcatatataatatcccacgtccgtattcaacgctctggatttggtgctttcctcgtactggggaaagatgaatttgtatagcggatgtttccgtctgtccgcaatgagagcgagaagccttgctcttggcattttatctcccagccatttgtcctcgtaatacttccggttcttgttcgtctggatgaagcattccacggccttgctgccgaagtattgtttcacgccccatttgtctgtatatctggaatccgtgttgtatacccggtacgcctgacatacgcaaaaatcaactaacctttctctactaatggcatcgccaaagtcggcttcaagcaaatccagacatttcccgatggtttgctgagtaacccctccttccggatttgtgatcttgaaagaggggttaatcatacttttcataatagtagagaaaacgagaatgatattcttaatttgttcttttttctccatctcggtttatcatttttctcattttctttttagccaaaaacaatcggctttttacggtctctatgtttctggttttaagactaccgcttttatacgtgatgtccataatctcgtgcaatttgtatccggcctgttgcaagagcaatgcttccttgtagatcggttccaacgaatccaatgcttccaatatatcatcattgtaatactgcctgtaattctcaaccgacatgcaattggcattgatctcatcatcgtccagtattgtatcgcctatatccgaaaccttcagattatcggaaaacttcatgtgtgaacgttttgagtccgcatctatgatatatcttttggttacgatatgaagccacgtctgtattgactttgtaggatcgtaggtttcgatatatttgaagaagttggtgagcacttccacatagttatcatcgatgtcttctgggtttgcggtatacttgatacacaacttatatacgaggttcctgtgtggaatcacgtatttttcaaataaaacggttctgcgagccgccgattccgcatctatgtattttattgggcagcttgcttgtctcggtttcgcttccacgccttttccacattcataacaaataaatctttagctgattcagtcaatttatgtgaagcgcagtagttgtgccaagcgtttctgtgccggataaacgtttcccttaccgcttcgtccgaaggtttgggagaagaggataggaactcgtaaaactccgagagatgtacggcaagcacgtttgtgcgcttgtctgcgtctctctgtctttttcttctttcgtttcttgctttactcataattggttttagtttaaacgatattttcttgcgtaataataaaatatacagatagcgtcactgtggttgtcgtcaatgggagtaataccgtatcttttatagcagaactccatcatcttctttttgtctgccctgccatctccggtagtccattttttgagtgtagccacattgataaactccggttccggcaaatcgagttcgtcacacacttctttcagtatgcctctgaactcacacagtttccgcatatcggtaaagtgattgttcacatttacatcttcagcgactatctgtttgatgtcgtatttctgaatgaaggccataagtgtatctctgaaatccttgtgttgtttgttattattctttcttttggattctgtgaaattccacgtaccgccttcatgcagtgaataatatcccgtatgtgtggcaatgtccagtgccaaaatatctttcttagtcaattcatcgttgatcgtttcgtttttagtggttctcatcaatgtatgattctccgttttgtttgttaataatcaacttgtaagggtagttttcagctacgtttccatgacttactacaagggcggtaactccgatatggttgatggccgagaacatattagccagaccattttcatccaccgcttcaagtatctcatccaataccagcaagtcaagtcccttatcaccgtcacagtttacatttatcagtttgtgcattgcaaggatattagccagattgacacgagccttttctccttcactcagttttccaaatgaacccgaatcaacaccgtcacggatgatggagattgaaattttgtctctcagttttcctgttttcagtatcgtatagccggaaaatttaatccgtatgtcgctgccgatgctttccaaaaactcattcgtaatcttgctgagagcttcgatcttggtgttggccagataagtcttgaactccacaaaacgctgtccttgttcttttaaagcgtttagcctactctcaatcttgcttctttctgaaacagctttagtagactttttcataaattcctttagtgacagcctgagagattcgataacttctgtgtcggatgattctttcagttctttgatagtctgctgtaaagtctcgattgaaccttccgtagcggaagtcgtttcctccagtttcttgattgtacgttcctttttgccaatctcatcatccaacagatcaaatgcttcatcgaaaattttctttctgacattacttaaatcgccttgtatcattgcaatcttgtcggagattgttttctgagacaagttaagatcattgattttcgatttcagcctgttgattgaggactggacggaagacagtttttcttcccagttggcgttttcttctcttaacttgatttttaaagacttggttttatcaatcctgttttcgtattcaaccagattgctgttttgttctttaatgcaggaatcaagggctgagacagccttttcttgctctaccaatgctttttcagcttcctccacgttaaaatccttgtctgaaagaagaaactcgtgcgagcatttggggcacttgattgttcctgccaacttggtcttcagttcctctatggcgacattaagatttcgtttggctcttatattctgctttacggattccgtgagcgaaacgatttcctgttgctgggaattgatcgtgtcgtcatattctttcagtctgtccggatatttggatgagaatttttgatagtcttcgtttagattgtcataatcattctttaaaccattcagctgggattcaaccactgaaatagacgcaccattttcttccagcttcttttcgagactcaaaatagattgttccttttctataatattttgtttccaatccgacaacccagcgatggaagcttccttgaaaagagccgcaattctttcaaccgcttcgttgggagtaattttatcgtcttcctcaattgtctggagattgccatctacattgtccaaacgatccaaggctgcgtttatcgaatcaatttcttcattgcattttctgatttcagcccgttttgaaacgatcagggattctttctcttcgattttctggagctttgtcttagctctttcttcttttgcattttcttctgcttcaatctgttcctgtaacatgctgacacgtccgtcaatgttagccacgttcagattggcctcgtttaattctctctggagaggaaccatatcttcttccagtttttcgatagccttatccacgagaatgccgtttgagaaccggttgatgatttctttcttgtccttgtcggaacaggaaagaaaatcttggaacttatgtttggaaagaacgaagttgttatacaattcgtctttgttgatgcccaacttctctaagatatacttgtcatactcgctaacgcttgaacgtaccgcctcgtccgtttccaccggtctgccatcacgaataatggaacactttaccgctgatgctgattttctggaaatctttctttcaacaataaattcttctgtgctgctgtcgcttaggaatctgagacggataaaacatccatcggctgcatcattgataatctcttcgttcttgattttacggagcggagtaccgcctataccgattgcaatcgcttcaataagggctgattttcctgaaccgtttgatttctgggaatcgttgtccagattgttcccgaatacaagagtcgttacgccttgttccagtgtataatcaagttccttaaatgcacataaattctcaacatgaatatcattaagtttccacataatcaatctattttagaaaggtaagacaaaccgagtgatgggtcggcaatttctttttcttcacaaaaatcctcgtaggtctttttgatctgcttgttgtcgaatttctcaaagaggcttgattttgcaacttccgtctcttcgatgtcttccgttacaatctctactttgtttgcgccggcttcaatgagcaggttcttgtctatcaaagaggcttcagaaccggaacaatggatacgaacctttactttatatcggctgtcgttctttatttcggaaagctgattgtaaaggctgatgtttacttttgagaagggaacatccagcgttttataacggatattcacctggttctttataaactcgtatgaaccgtcactgtaaagaagggtgtagcctttatcctcgtcttctccgaaattatgctggcggcttgaaccgatgtattcgataacagttcctttgattttggttctgttgtggtaatgccccaccagaaccttgtcgaacggttcaaataatttggctggaagctccttgtcagaagattgtgcaagtgccccattaattccttcatggatatatagaatattttgctttgtctcggataaattgttttgaataatatcctgaagtctttctgtaaatgaaccgttctcagggaaataagccattatgaacaggtcaaatccgggataacctgcgatataataatcgtccaccacatctacattctcgtgctggtcgaatacatgacaatacccacgaatggcttcttgatttaccttgtcatggtttccgtttgcaataattatttcaatctgtcttttctcggcttcaagcagcgcatcgtgtacggctaaaagtacatcgagagtctgggaagcacgggattgaaacaagtctccaccaatggcaatctcggatatatcgtacttgtcacatatattaagagcttcgttccagttcagtttaaattccggaatattatcgtttgaaacatgtatgtcgttgaataacaagatacatggaactttcttttcagtcatggttaaatctctgcattaaaaaggcgtacaagtacatgtgtcagatgtaaatgtacgccttcggggtaagtatttaaactttaattatctgtctcttctgcgtaccattcttgccgaacgtctttctctttggattgcaggttcgttcgtatcatcgtttctggtggtacggaggtcttcttccggttcagtttccggttctggttctgaagccggttcttctttcgattcttccttttcttcttccggttcctcggcagactcggcttccggttcttcattctggggagaaccaccttgcaatacgtcctcaatcatgtcaagcaacatggcattggttgttgtacgggtcatacggatttcgagtttttcttgctcgataaactcacgaatcttgcctctgagttcctgaccttcttccgtcttgtcattcaaccctttttcctgaagctcatcgtacatgtcgaaaagagaatcaatagtgattacgccacttgtgttgtccttgtctgaatcactatctcctttcttgtcaaaagagaacgagcttgtatcatcggaaggaagttctgctttcaggctttcaatggcttctttcatttcatccatttccataatcttcaaatcgaactgttcatcgcattgtttcagataaatcagagttgcctcaaagtgaaaacgggtataacgatacatgacttcgggaatacggggcgcattaagcagtgcggtcagttcttccgatgtcaacacatccacatccgattcattgtcgatattgatggaatattcggttttagcaccgttctttttcttttcaatctcaaccgggaatgcgtttgcaattgacgagatagggcaggggtatttcggattcttcttcagtttcttctgccatagcttgaacttgcattcgtccaaagtcttgaactgtgaatgactgagacggagaagctgaatgcctttggcacgttcgtccatatcgaacacgtacatggcatgtgagtaatcgtatttgacaccaccttggaatccatcgtccagtttttctgcaagcttgtcgtcattctgcgctttggcttctgcgattgccagtttgcggtaagtgtcaataaggtctgtcttgtaccctgcataacctgcacggcaaacagaaacgtatgtgaactgctgttttccgttatctgaaggtttttgaatcttcattagtaactggtggatcggatactcgtagctcttgcggtcaattgtaccatctgctttaggagcaatcggaaggatacggaaagtgtaggttccgaacttgtccatcttgatgaactccgtcttgacaaacgacttgttctcttctgcggctctggcttgggcttcttcataagtttcctcggctgcggcaaataactcaaacactgataagggctgttgctccttttcttcaaatttttcttcttgcataatgtagatagttaaagtttaaaattaaatttttcgagaataatctttccattgagaagcataggcatcggcataaggttctgacgctgaaggaagtttcaattcgtctcttgttatgatttctatgttccacttggttttggcatgatgaatgattttctcgataacctcattcatttcacttgattttgcgcttttcaaatcgaaatactcataggtttctccgtctatttcatctttgagaatcggagcgtacagttcttcaaagtatctgtatagtgcagatataccgggatgttccggtagttcctcagatattctctttagaacgacaccattcaggtatttcaactggggaagagtcttgttcttttccttatcgaatatgaggaatccatattctccgtctgaaaggtcgtacaaactctctttaaattcattaaggtctacgtctccatcattgatagttacgataccctttgagcgtatagccataattaattagttttggttttaattatgatgcaaagatatatgattgttgtttgatttacaaaatattttcggaataattttcattataagtttgcattgtattgtttgatagtttattattgtttttattttgtatgttatgtatatagacttactctttatttaaatggataattctttggtttgaagagcctctccattgaggatgtgggatacttttactctcaatatatcttccatcaaccagtacatctatatattttaatataggctcatctttgattttttcatattcaaatcctgtgtacatccaaattgttttattggggaacaaatacttgattctttttacaaaattcagtatatctttcctgttatcataaaacattggatcaccaccagagagggttaagccgcttacatggtcttttcttagttcatcaaaaatttcaaattctgccagatgatcaaatttctttccaccttttgaatcgtgtgtgaatggattctgacagccgggacagttatgggagcatccggctacccataacacaacccttagaccgtcaccattcagcatgtcgtttttagttatgctgtaatagttcattgtttttgttactttaaatcattacattgattttctgtcgtttatttcctccatcttggcttcattgagcatggtgtcaccttttacccgactgtaactgaggtatccgttcatccgatcgattttggttaagttgctactaccgcatacagggcaggtgtccatatttaactcttgatgtccacaatcattacaatagctgagagccatattgataccttcataatagcccattttcatagctcttctcaccagagttttgattgcttcgatattataatcaatcggatagcggacatattggattttaccaccattgaatagattccagaacttatactcaatatcctgtttttgtatcggatcaatatcttctcctacccagcaatggaaagagttagtcgtataagcacggctggaaacaccttcaatgattccgtatttggctctgaattgttcaatctgaagaccgcacaatgattctgccggagttccataaatggcgtataatcttccatcttttttcttgaactcttctactttcttgttgatgtattccatcacctctaatgggaattgtccatcttcagtgatagttttaccattatataatacgttcaattcattcaatcctgtaatcccgaagctggcggttgcggattttaaaacaggggcgattttatcgtttggttgtaaatgaccaccataaaaacctccttcacaataggtaagaggactaatggacgctcttttgtttcccagaaattcataggttctaagatgaagaccacggatcatttcaagataataatccaatacctcataaaaatccttatcttcttctcttgcttttgccaagatcataatgagattaagagtaatagctccgacattgaatcttccggtgaatactggagtgtcgttcttatcagccggattcatgccacctctctcataccagggggataagaaagctctacacttgtctttcgacacggactatctcttttacgctgctaacgctactctgcgcttccacatctggaatttcaccaactatgtactctactcgtttattctctggaaacgaagcttttatttccagatatactttcgatagtctctacacctgcttctttataaaaagaagattggcacggtattctttgtaatcagttcgccgttagccagtataaaactgacaccctatttttataggttcacagagttttaaatgagccgtagtttatgcaaccatcagttgacccattggatatacaactttcccatatttcttatacatagatggtacgtatccttctccagttaaagaaaggaaatcaggatacatacatttgctggaacattcaatcgcaacatcaaacaatctttccaattctccaccggctccatgtaaattttcatcatacaagaaaatcaatttggggaataaaaccggacgtttaaacccttcctttccttgtcctcccatacgaactctcaatgctgtttcagaaacaacacgaccccattcgcttgtgtcgattccgaaagcaaaactaacaaaaggataatcccctcttgaagaggcaacagagttaagttttatttccaatccctgtaatccttgttcaagctctcgaatcgtatcttttcttgcatatttgacaatatcgttatttaaaggttcttgcccggttgcttttttaatcatattgaaatatttggtgtaatatttatcaaatgatttccgacaatatggagcaagaaaatcgtcaattcggacagacaatccaccatattgactggaagcagcagccataattacatctcctaaaacatcacaagctacatccacagtatgaggatctgtataaaagatatttcccatctcaaacccaccgtcaaaaactgccttaacgtccaataaagcacagttcatcgtgtcgagccgtgctgatctgtcgtgaatatagatatacccatcttttgcagcctgtcgttcttccggattcaaaaagaactttttatatcgctcgtcattgaatttattatatccgatactacgctgggtagttaccaatttactgtctgtattgctgttggatttgtcgcctcgataggcaaccgcatcaatggaacgatgtacccggtcaaacatatcgacaaattcctgcttgtaatttcgataatcccgataagacttagcaacggactgactgacttcgtctaatgccatttctaccagtttgtgcatggttggaacatcgacatactggagatttctttgcttataaagattacccagtttttcagtgataatttctataaccctgtcgtactcatcctgtgtaaattgtactaaaacccgatctgcacttttagtaacagctgctttaattttatcagggttaaacgatacaattcttccgtctttctttttaattttaaagacctgattcatgattaaagtttaattgaaaattagttattagattttgctccaatctgaagagatgtaaaattcttcagatattcacttaattcctttttaaataccggggtgttattgaatccgcagcatctcgattcgccgcatagtccgtttcgatacacgcattttcttaccatcattgctgccagttctgaatctgcctttgcaacctcgtccttgatcgcttggaatacctcgattgtttcagcgtgcgcctgtttgcaaagccgtagtttggccatatcaataagtgactgagcgttgatgaacaaacctaagtttaccggagtgtaacgatcggaatttccctgaaggtaagtaagttcgtcctgtatctcggaaatgacgaaatcggcataatccgatcttccttcctgcacctcgtttacgatattgttgagtttggatttgatttcctccagcttttgaatgagactgggattaccgccttttcgatcgtcccgacaggtaagttggaaaggaacggagcctacatgatgtcgtaacaggtgtgttgctataaacagcggaatgttcttacactctatccaaaatacctgtgttcgggtaggggagtgttccgctttatacatactgagaagtgattgtttgcttgtgcctaaaaaagtcatttcacaagctctttgcataagtttcttgtcagtcaattttctaactgacactgtgaaattttggttcataagttttggttattattgaaaaacgtggtacaaacttactatatataaaaatattatgcaaatattagtgatgaaaataagcgtataaaaactcgaagacctctccgggtgcgctgttctacgggaagcgtgagaggtcatattggttgcaaagatgaggttaatatttgaattatcaaataataaccgaaaaggaataacctattatatattaaaagacggtcaaagaacaacgcctctctgaccgtctcaaaaacaaataactctctataatatgagtctcttctttaaagctttgattttctttctgttattggatatgaatttctttagcttttgattcctgacggattcataatacgctttcctctcaggagtcagtttctttcctcttctgcaatacaaaccgtgttccctgtattcctccagataccgtgcaaatttctttttctggaaggaagggtcttttgatgccttagctattatttcaataacgtctggagagggttctggaaatggagagttgggtgtggattgcatgatgagattgtaaacgaccggggtttcatacaagagcatgaaccccagccgtgtttcctcaaacctgaatcttttaagcgtcccttttggtcttccgtccagtttgtttctgttcgttgctctccgaggctttgtcagtcttactccgtaaactttctgtgctttcggcatttttcttgttttctgaaggttcggggctttcttttatcttgatagccggagctatccgtttggaaatttcagccctgctctttagatcgttgtaaacattagttactcgtctcataattaaatcatgtatgtaaaattaagttctgtttcgccaacataatcactttcgttcagttgtacgttgcgacttcctccttttatgaaaaactccgcacctctgttgtcgttatgtttttcattaatttcactgaaagaagtttttactgaatatctgggtggatctatttggtttggtattacggctatgacaccgccccagttactaccatttcttttagcagtatgaactcttccctgtatggaaacaatatctccaatttgtcttacatacaaaccacttgtatctgtttcgctaccggaattgcccatttgtaaccaaccagtatctttcagttttgtttgatactctttggcataggcggctcccaatctattgcaaatctgttttttgtcctcttcattagcaattgaaaggtctgaaagtttattgttttttttcagaacatcttcgtttccgggacaactaatcttgtctctgagagccttttgagcgtccgcttgactggttcctttggatatttggtagtttatgtaatcttggaaaagacttgaaacactggcatatttcccgtccgcttcacttttggtataaacatcaatgtttttagcaatcgtctttttctcatctgagttatatccgtccagtaatttgttggcttttttatcaagctcgtccttaaccactttgcctgtgacaaatccttctgtgtttgatgtcaaatctcccacagtgataccatccaacttatctttcaatgcggtggtaaaatcttcggtggacaattgttttccctcgactttatccactttcttgttaaggctgtttgtcaggtctgttttattggcatatatggaactgatattttcacctttgatttttaactcaccttgaatgtcaacgtaggttttaggggtcagagtgatgttgccaattatgtttttgatattgaaatcctgggattggtcagaatcaaatcctactgaagcgatgttctcattcttactgtcagcccattgtaacgtatttgtaagagccacattgtctttcgtgtactgggcattaagcagtaccaacccatctccggcgtttttgacggtcagttttccgttggcattgatctcttttgtgcctccttttacttgtaagattgcgtttttcttaccgtcatacaccgtgaaatttcggaatctggagctttcgttgttaaaccccgtataattgatgtccacctctccattatcatcgtcactggtaatgttgatgatatggttatctgatagacagatagagccgactttgattgtcttgtgagaaacgctatctaccagaaccccgtctatcgtgaatttggctatgaccctatcttgtttcagcaatgtaaacgatccgtctgtgttgatggatagctcatttaccaatagtccattgtaatacagtccgaccgatccgttgccatttccctttacaatgcttttgagcacatgaccggatgccggatgattgatagacactgaagttttggattcaattgccttatccgctgagaaatctccggctacgaccagattcttttttatcgtttgctttgaaaacggcgtttccagaagaaccgcatactttccgatgaacttatctataaatctgggtgcgtatgaggaagtaacctcaatgaattgaagtgcgttttttgtgagtgattcagtcggttttgtctgacttcccacacacagataattatttcgcccccttttaaccgcttcttttgcatacataacggaatccacggtgttcttctctacaagatagtagggaaatttgatccctttgcttccttcaaagtatcggattttcttgtttatccaaacatacccggaagtgatctcattatctgaaacaacttcgcatccggatatgatgaagtttgcacaatccgtaaatatagaggtcatactgagcgttaactcctgtaagttcagaatatcgtctacatacgtgtatcgtccccctgcctctgctacatattctttcattatgctttattatttaggtttttggtttgtttattgtcagttttaatgacactctgtttcaatgtctgcgtcataagtaatcttcttctaaacatactcatgacgcacctccaatcaccgctaagttatttacaatacttacttgataggttttgtttggctctatcgtatggtctccaatccatctaacggagtcaggcatatttaaaaccgttgcggtttctccagaagtaaactgaaacatatattcgttcaatacattcggggtttctggggaaaaagttatagttaatgttgtaacactttcgaatttatagaatttattgggactgatagactgggtaggtgtggctccttctattaaaacagaagacataattccactatcgtctttgtctccttttaagccttgtgcgccctgctcgcctctttctccttttaagccagaaaaagcaaatgaaaacgaagtagaatctgtattttcggattttgtaacttttaccgatggtgttccggttgtgtttgcgattgttgcagtggcttcaatagccggagttttcccatcttttccattagtgcccggctctcctttatcgcctttaactcccggaatcccttgcgttccttgtttaccgggttctcctttcagaccggaaaattcaaataaaaacgaaggagattcatggtttccggtctttgttactttgacagcaggagagccacttgtgtttgagattgttgcattagctgttattactggggttgtaccattctttccgttgattcccggttcgcccttttcacctttatctcctttgcttcccggaaacccctgttctccacgatctcccttatcgcctttcaacccttttaaaagagaagatttaatcctgccatttattgaacggtcttgaaacggaatgtattcttctccggttaaagatgtccgttcgggaacttctatgatttgttttccttttattgccataattcatgtttggttaagtaatagggtttgaagcaatcagttcacaagtggcggtcttgccaccgactgttgctgttatatttgcttgtcctgcacctacgacagatacgatgccttctatgaccgttgcaacactttgattagaactttgccatataatctttttgtcagtagcattgtccggcaataccttaacagaaagttcagcttcattcccgacattaaggataagcacgtttttgtttagggtaacagactgaaccggaatatctggaggtgtggtatcaattttgatcagatatgtttttcctgctattttatatgtgtttatcacagaagataacatatagacaaattccttttgtgagattccctgtattcgggggacacacaccatgaagcttaccttattgatcgctttttcttccgtgataaaatagaactcccgtggcttttcaagtgggtcgtctgtcagttcggattccttcatgtctttccagataacgaacggcttgccatatttggaggattcccgatataaatctattcctataatctgagaatcctgtatgtatatccgatcgttcttgtctgcaaagtattttccgaacttatggttcagataccactcgaaatacatcacttgactggtcatgcgtgcttcgatatgccgttctttggcaaagtcaataaatctgtcatttattattttcaacggataaaccaaactctgaataaaaagaatgtactttcttcctccaagataatgcggaacaagttggttcaccagtttgtctatcggtaacttgtatctcatttggtatctaccactaatttgattgcttctctaaaattgggaatgtcggcttcctcattcttgccggaagactgccttagataaccggattccgtctgcatgactcttccgatttttttctggggactgatatgtccgtctccgtcatagcaagcgaggaagattccctgtccggccacgtcttccggatcaatatagacatccgttacatgttccgcacttttaatcacttcaagaattttagagatatacacactggaatcaaattccatgttcattatgtattcgttcaacttggattctatattgtcgtatatctcagcctcggttacagcaccgtcataatataccgtcactttgggaacaaggacatctccttcacgactgataaccgaaattcttgttcctgcaaactttatctgattgatatatgtgttaatcatctgcatctcttcttccggtatctttgcaagtttgccttgttccccggttgcaaccttcaatataagcgtactgtccagattctcgtcctgtgtgctttctatataggaaacctgggtgatgatccgtttagtctcgtctacggtcgcatatccgaatgccagaccgtcttcccgaaccacaagcgtgtctcctttttgatattgcagcaaagcgttggcgtaatattttggagttccattaactctgttgttgattacggttgaaatatcaatagcaaatacatccaacagcatttcaaaactctgtatcacggctgcaaatgtccatgtgataccgtttagaacggaaaccttcgagtcactgttgaactccttcagttccattctcttgtttctttcctctacggctgctttatatatatcgttgattgttctactcattttgtggcgtataggtataaatagtatcgttaattataaacttccatgccccggcttcattccatgccggttcgtgggtcagaacccagaccgcttccatgccggagccaacaatatagttcagattctcgtctctttgcggttccctgtattctccggatggaacagttgtcattgcaatttcacagttccgtcttccataatgctgctttaccagcccgatcaaatattcgtcaatggctttcctgctgcatttgatattctggagattcaggcttttcagttccttttgtctcaacaaaggaagcaagctgccggttgtactgccggaacaatccatttcaaacattcctttggacaaagcaataaattcgattgtcgtggatatgttcttcatcacaaaacgctcaatatatatgggctttaagatatatatgtccgcgtccttgatatttgaaatatccagtttttgtattctggcattttcatccccataaatacaagttcttcttttagttccggtattgttgtcgaaaaagtggttaagctcaatagcctgtttggataaccgtacaatctgtaaatcagtattgtctccccagtctatctctatcgttcccgaaccggagattacaaaaccgatggatgttctggtattctcaatataaatgtccatcagtctgggtagggtaggggatttaggataaacatgcctctcaccgtttgccggcatgatttcatttaccttgtaatatgcggccacatctttgtttatgacataatcgtctgtatagacaagttcatctcctgccttcaatgtctggtctaaggaaagtgatgtgttgttcatcatcaagtcaataaccccttcgatcgaaccatatatatgcagggctacatcgtaaaggttttgtccgtgtgttacaatatatttacccattttgttcttttagttctaaagacaattctccggaaaccgagtccatgtacgcattgactactgttaccttgtcattgtcaaattcttcctgtaacttctgagccagtccggtattctcaaagttaccatgcaggtagtcgatgagtccgatcccggatgtggggtgttgatataaattcccggcaaatgctttaagtagaaacgctttgttctgttctaatgactcacaaattatcaagtcggtctcatgaccgctgaaaactgaaagatagcttccttccttcaagatgaaattgaaattgccgttctcattcagcagtctgtactcggagagctttatagaatctttcttgtctgtcgtatcgccacgatataccggaaaccatatttgattgtttctcttgttcaaaacatattcaatatgtccgttgccgtaatcaatgcggaacctcaccatcagttctttgtattccgctatatatggaatcctgacatgtattccatcttcgtctttatatgatttttcaaagctgggagaaactactatctcggaatagcaatagttgtcattgtccatcccgacttgttcttccaatatcttgaagtcgtatataatcttgttggtcaggttgtcagaggtctccaattctccatatacgacatccatgttaatatcctgtcttgccatgttatcggttttaaacaaaaatcccccaaccaacaagagtgattgggggatcgcactcttctttaaaaagattagagcacgcttttaagaatagttgtaatgattatttagaagcatcagagtcgtatactttctctactgtcgcccacatatcgtccggcagttgttcgtccgatattttttcacaggcatttttcatgtactcgatttcctctgctgtgaaatccgttaccaacggcacgtctttttccatatcccattcgatacggttgttttctgcattttgtctgagattcacagtcgcacgttcctcttccgaaatctcgatttttttcagaatttctttcttgatattgaactgcttgaagttgttttctttaggcagaaagcctgggatgtagagcctgtctttgattgatagttccattgcttaatttatatatttaggttattatttttattttgatagataagtcggctgtttggctaccgcttccttgatttcttccaagattacattgaagtcctcaaaatatttactggatgcaattctttctttgtaggggaaggttccagacagatagtctccgtccaaagtaattgttcccagatattcattggtatcttcaggctttggcttatgaatagaggcatttactcttgtgagcaatttatcagatacgttgtattcgatttcatatttggcatttaccgttgttttggtgcattgtgtctgaatgtttacttgtttaatttccatataatcgatatttaattgttgttttattgaagaataatatgttgcaggtgtttttgtttgttagccgcaataaaacattagccacccactactgcattttataaatatgcgtgcgcaattgtctttaatctgaaaactactcactgaattacggagtggcgcatcaatgatcgttcctttaatgttataccatcttgaactaaggctttttacataaatgattttaccgtcttggcaattaggtaatgttatggtaacatctgtggatgtttgttgtataattaccaaatcatcattggaataaagagatgctgtagagtaaatgtttcttacgcttacgtgtaatccatttattcttattctttcaccacttcttgcgttcaacaatacatttccataactttcaatagcatatccatatccagaagcattacataatacagatattccttttgtactattattgcttccataggtagatacacttaatgctgttcttccgtctccacgtacagaaaccatactgccatcattaacacgaaaaaaattggttccgctgatgtcaatattgaatttggaacttgaatttccagtcataacgaaccctccagaagcatggaatgtggtagatcccataccaaaacttgcagatccgtctgcattcagtgcccaataatccttactatcagattttcttgaattacagatatatccagttttatgaatttcaattatatgaccattttctggattatcgtatgtagacattttgtgtccgtaaatagtgaatccaccgattttaccctgagtgaaattacagttggctgcgttgatctggctggctgtaagggttccggtgtagatcccgtttgcgtcaattttagtcaatctggctacagggaatgtaacggatgttttaggtgagacggtttgttgatcaattgtatatccagtagagcgtaaaactggaactccacttgcgtttttcactctaaatacatattttccaccccctctgacatatatgtattctgtagaagaattggtaagttgcccaatatcaccaacaacgtttccattattccaaccttgacttgcttcgagtatttctctggttacagcaatagtgccccagccagctccatttgttgtccatctaacttttacagaataactgccgcttccatgtgtaccccacgaaggttttgcttcgctatttaatgtccaatgtacgcttatttcagctgttacatgtatgtgtacattaatacaaaccggatagtatgtattttcgtttagctctgtagcatcgatggtatattctttataatccttcatttccggcaatgcgtttgaatcaaacgtaagtgttcctgccacatcccacttaatattgccattcgcaagctgtcccgagccatcattgttcagtttccatttcgtaccgttggtgatggaaccgtcagaccccagagaaacactgtttttggagattgcgttctctgcaatgttccaccctccaatctttcctttggtgaaattgagcgttaacccctgaatatatgaggtattgatgatattggtctttatactgttggcatctaattgtgtagatgtaatagtcccgaccttaatttcgtttgcggtaatagctccagcctgaatcttatctgctgtaatggtacgtgatgcaattttgttggctgtgatgctttctgctccaataagatgggctgaaatcgtacctgctacgatttgttgggcttgaattgttccggtatacacacctgttgcatcaatatatgttaatcttggttgtaggttaggtaatacggttccttcaaccaaacctgccacatacaaaaataacccattgcttgctgtaacaggcttatctttaatatgcgaatacacatgcagttcaaaagaatcggtatctaaaaaagaatcgtctgtcattaagtatgtactacctcttaattgtgactcgtagttttcaagctccgtaggcaaaatggtcgatacattttttagaacaacatattttaattgtgtagcattataaatgccaattgtatattgttttactgattcattaaaatcattataatcatcactttcagcaagcccccatcctgcaccgcaccaagtataggttgtatttttcaataaagctgttttgattgggatttttagatattcgtttttattgatttttgtctgccatgcttctgccagtgctttggtttcaactgaaacattctttaatgccttatcaatgcaatctgtccattgtaatgatactgatttgtcgaacataacatttccatcaatatcccacgaaatattacctcctgccagtgcaccagccccagaagaatccagtttccatttaaaacctctgattccgttgcttccaatcgttatagcacctgaagcggaagtataagttccagacgtattgctttttgttcctctaaagatagaatccccatcaatagtccatcctccgattgtacctttggtaaaattgagtatcaacccttggatataggctgtattgatgatattggcttttatactattggcatccaatttgtcagacttaatgctccctgccgctatacggtcggcagataggattcccgtttttatactggaggcatttatatttacggcattgacctgttcagcggtaagagttccagtatagattcctttaccatcaatataggtcagttttgggaaatcctttcccccaagagccgtattgattgctccaataggctgtgtccaattgagagaaacatccgaaccgaactcgatctttccggttgtcgcgttgtatctgataaattggttcccccttcccagtcctgcgtctcccgtattatcgacatagaatgtcttatatccgtctttgaatccataaataccattgattgtttcggtagtcacaactccggatggatttaatacactgagagagaatttacccatagctacccccgtcaatgttccgttcgagttttttgttccggcaaatattttaggtgtaatgacagaattttcattgatttgagttttgttgttgttccagtctttcacccaatccaacatgttagaatcagctccggcagctcctgcatgtgcttttgcgtatgaaaatgaaacagcaaagctctttccgtctgcaacaaccgggatactaatagtcccattttctgccagtgatgtgcctacgttaaaaacaattgttacggtagctccgcttttagacaaagtacaacctgccaccgtgggtaaagccccgatagttggagtgacaggtgtacttcccttcagaatagaaattgtcgtatttgtagttaccgcagtgtgtatcctgccgtctttatcagtggaaacaatatatgagtttctggaagcggacacagtgtatccgtcagttccgggctttccgtcagaaccgttttgtccgttcttggattttgcccatttgaaagacacggtgtatgtattcccctctatgatgattggaatagggattgttccgctatctgccagcgttgtggtattagcagccacagtataggttatggtcttgttggtattattggcgtttatagaagagaatccggtcggcttgttgattgttccgatcgtaaaattggtaacggcattgtctccggatgttactttgatggtagaaacaactgtaacggcagatggtattgtgccgttatttagtgcattaaaaatatattctccgacagattgattgatggtgtatccgtctttttggcaaaccaccacggcttgtcctcgtgctatgatttcttttcccatttctattctttaggttttgattttacctaagaatagcataaaaaaagggcaggtagtttgtcgctaccgcccttgtgattaaaaattatgcttttgagacttcacagattaaagctccctttccggtcacatctgcttttgagaccacgatgtttttgccagtgtatgttttaagcaccgcagatccggcattgttgtataatttccatgaataaatatatactgtgccttctgcgtcaatttctgctccatttcgatacaatatagcttttacatccacatcatttgagttgtttttaatggtaaatccttttgcactctccaagaacacctgaatgggatctgacatgtcggagaatgagattatatcacagacaaccttgtttgcagaagcattgccggagcttacatctgtatccttgatggcacatttgaaagtttcaaagttcagtaccgcatctgctgaaatggtaatctcgttagttgtccatcctgctgtgactcccatttgattagtggaagtaagacaagaccatccagacccaagcattgaattataaaaaggacttgtcacctgagaacctactgttgcgtttgcggttaatccagaggttaatgtgacagttaaggtatttgccgtgacagtttgaatagtatatttagcagaaccgatttggatttgagtgccgggttccatattggctacactattcaacacgatacttgtagctccttgattcgctgcggttttaactgtggttggagcgaacactccgttatttttaataccccagcaatatgtaacgttagttgtatcaattgtagcaccacgccacaaatcacagtgcgctctaagtgtttttacttcatcatttttgaaaatcaccccatctggtgcgtaggcgatagctgcaattgtagcacctgcactttggtgttgtgtgaactggatagttgcccagaaagggatttccaaaccgtttgcatctatataaataccctcaattttatattgaacctgtggggcggtaagggtcatgtgattggtcttgattgtcaatgcgtatttggcacttgacgcaccgatagtacatccgtcttgtccagaagtgataagggtattgtttttgtaccatttaacggaacctgtcttaacgcccggagtaagactggctgcattgcccacagaagtgattttatcaaccgatccgcctgcaaaaagagatggggttagaataagccctgttcccgatgtccagttcggagtgtacgagtcgttatccttgttgtaaatctgtgtcagagccaaattggaagaaatgaacgcctgaatcgaaaccgcatcgttctggtcaataatggttacttgacctcttgctattttttgagccataattgaaatttgatttgtatgatgtttaaaatttgattttataataaatagaatatgagaggggaataggtttagcaagagagtgttttaaagataattctcatatataaagcaataaattgaattgtcacttcgtttttatcaataatattaatattgcatcaacttatgtataaataccatttgttattgttgtgtgcattcacaatcttgttttcttgctccaaacatgaaggagtgtaccagcgaacttcctgccggatggaaataaaagaaggttcggtctttaccttatatgatgaatctctaaatccgatagacgatttgattttcaaagagaatgttactttttatggggaaagaatggattatttgccagaaggagacaaacagatttattttatagaagacatagatacgattttcccaaaaactggaatcagatttaatgatttagcaataatggttgaagacggtaatataacttggatcaaaagtaatagttctgaaacgaatttttgttttgagaatatagactattgtgtagccaacgattcggtttgtcatttcaaatgttatggtgacaaaagaaaccattgttttacttatagtatatatgatatgatgatacatattcaagctgatataaaattaagcttgatgaattattaattcggaaatatagaaacaaaggttcttgcctttgtttctatatattggttagtttcaaatccacataacaatcaaagacagccttactataaacatcatctcctgtaatttccagagtcctgccaattcgaggaatgctgttccattctgcatcggcttctacatctttacttgtccgagtccaagaaaatcctgaagggtttatcttgtccgttatgtcttctcctgccttgaacacgtatgccgtaagtgtcgtttgtccgatcccatttttaaatatctgaccattacttgattcgatatacaaagaatacgcatcatccccgtcatataacttattgatggtaaaagaatccttgtattccttttcattgtacatggcagaatacatgatagtcaatgtatctctgttttcccaaccttcaaaatccggcttgatggtaagcgtattcttctgtacaccgggaatccttacccagtctccagaagaggaaagataagaccattcacgctccgtatccttgctggtaaaattgtattcatccgcaatcagctgtatttcatttggtgtacagacattctccaaactgtccggataatggaaagtgttttctcccgttatcttgaccgacttgctgacgatattgtcctgcgtttcctgatccatatcgtcccatttgatagtcacaccggtcagttcgatcgtgtcttccgtccatttgaaccttccaccggcaaaatgtccagttccgtcccgattgataacgaatgaattattattagaagaaatagaaccatcatcattcagccttaataacgggttctgtatcgttcctccgataccacctctattgaaccatgctccataatcttccgtttcgttcaggatttcatctgtcgcctgatataaagtagccctttctccaaattccagttgtgcggatgagagatatattgccgtaatgtctgatgtcagttcgatattgaaactttcgttttccttgtaagacgcaataaaaggaatgctatatctaacccattcgtttgcgacttcaatattgatcgagtacaaaggagtggagttttgcgacacagaaacctttcccgtattctcgcatttcagccaacatgaaaaacatagtttctcaccttcatgctttttgccccaactttctttttgagcaatcaacaccgttttccccggagtaagtgtaaaaatatcccccaacccggtaggagacacttcacccatcgcactggatacgggagtctggaaattgccatacaatgagtttatgagacaattcttgtgtatctttccaacgtaaaaagtagaagcaaatcccttttcgtctcctgccgtaagcgtaccagctatattgacgtttttagtcgcatacaagttctgaaaataaccgccatacccatccagcaacccaaacacagggtctacaatgcctgtaacctttccgatccttgccttagtgccgttggaaaaagtagcaatgtctgacagcaatacgatgttaagatcggaaatctcacaccaatcgccagcagacaaatgctcagtcaaatcaaccagaaaacttctcatatactgtggaggataatccacaatggtgagtgataatttgtattcccatgaagttgtgatgttaataatctcgcttccgtcaatctcgcttccgtccgtatatccgaacgaagttttaacaccacccatatttttggaagctctgattttgtatgaagctacgacacactgcggattaccaacctgcctttcaatcgtttgcttgaagccgatcgtctttgatgaaggattatccgtgttgtttcgggtaatgcgaaataccctatacacatcaccttcctttgtcttgctgtattcttgtgagacaaattcttttccagaacaggcgtatttatacaaactgggcatgttcccatctccgtttccggtaacaggataacaaagcgagttttccgtagccattccgtctattacgtccataaacggagattcgctgtctgaagccgtaagatacaatgcaccgctacgatcggcatcgaacaagttggttactctgacaaaatcaagaatttctccattcttgggttcgtttccatcaaccagcattccgataaaataaggggagcgtttttcttcattatcctgcccggttatgatgtctgttccggtttcaacaacaatcatcagagaatatatgttgtttggataatcaaaatactgcctccttacaatatctccttgccgcagcccttgtgtttttttggaagaagggtctattctgattttaaatttaggacatgtatataatgacatattattaaacaattttttctacaatatcaccgctacatgagtcgcttatccacagagaaccgtttgtcgaactgtctttttgcacttccaattcatagactctcatcttctttcgtatcacaagttcatcgaaagtggcagtggcatttccggttgtcggatttttcataatagcccaatcagaaccagcgaatccgggagaaaacctctcagaactgagactgtctgtgaagtaagcgtttccataatgttttatacctccagctacagcctgaaggtaactcatgtttgtaaagaatagagtgttgtcagtaagtcgggttgcacttccgtctattccgatatgcccttttgcttccagcggtttatcaaacagaacaaaatcggctttggtcgatatatacagggaatctgattttttgtcaagcggtttgtagtggcttgtcgattcttttatctgaaatatcgtatcatatatgtatctggtgttcgtcccggtttcttcatcgaacctttccgtaccggcactgagaattaacccgtccttatctccatggagataagttccgtcactatcgccaaatctcagtctcttatgaataaccaccccttcgttggaatcatcttccctatatgtcgaaagcaaatcttcaccgaaattatgccttacttttaatgaaccggggaaataagcctctccatattgagataataagagatttgtcccatgaatatccgtaatgccggtcaataacctgactttgctcgtttgatcggttccaagtaaaatatctccaccgatagcccctaattgaatgtctgtttcgttgggtctgaccagaatatcggcattgccaatctttatgccgttaccgactgtaaaagacatatttcctttgactaccgcctcattgtctatgatagtcaatatcgtttttcctccagaaccaagatttacaccataattggcattgagagtgttttgcaaggttaacaccccttttacgtttagtgtaccggcaaccttggcgttacgcatcacccagtctatatgctccagatttgcgtttcctgcgtgatacacatcactgccatgtatttggattgctgaaggtgagataaacactccagtggccttattttgcccgataagcacctctccacttcctttaatagaagaatctccaaaatcaacgattgcacctgaaatagatgtggtgtcatggtctgtatcgtaagcaataaccttcttgttccccagataaaagttattgccaccaacattcaacctgccatctatctgtattccatagacagggttttcttcttccgttttgtacgaatacaggagtctggtattttctattcctgcttcaaacccataattggctcttagtagcccggacatatcaccgccacttttctttaaataaccgactaaaatgccgccactttcgccatctccaccgcttgttatagattcggaaatcgggctggcaaagttgtatgccgtatttttcaatcggatggaagtctcgtctccctccactataccaaacggatgatcctcgtcctttttatcctgtgcattaaagaaactattatatagctggatgtaaagcgagtaacataagctatccttgtcaagtttttcgatttccggattaagaataacactcattttgtatataccgttttgcttaaaaatttctgaatcttggaagtcaatgatgtaaagttcgggaaattcacggccggcatggttcccatgagcgttggggtggttatcttgctgcattcggtaaggaactctaacatcagttgcgcaagttcctgtcccaatacaacaggttcggtcgcatcttcacctccgagatacacttttccatccgtaattccgaccgctgtgtttccaactttactttctatcttttctgctgactgattcacttccgacttgtctattctatgctgaatatcagtaggagtcatgttaatttcagtctgtttcccgtctttgtctttggcaacagtcgaaatcttgtccggggtatatttggtggaagtctcatttcccgttttaggcaattcatcatagtccggggaatcattgtcgttcggatcaagtttctcagtctcagttgccccaacaattgtctcgttatgcgcatttaactgcaacacgtctgcatgggaaaaattcaggacgtacatatactttgttcctgcatccgaaacgattgtgacatccgagaatagggtagggacaataagaaatcctccggaattatctttcagtccggacaacaaaacccctttatgaataatcggctctgaagaagcagtctcgtccggaaactcacctacatcaatcgttcctgcatattcctcgtattcttcatcattcggatcatcatgtatctttgcgacatagccatgaatcattctggccgtaccaacacctcctgtaccggcaggactcatgttcgctctatcaaagcttcttcccagtgcaatcttcctgattgcttcctgaatcattctttgactgttgttattgttcgtgtttatattatttgctgtttccataagtggtctttcctgttattttatatggtatggttattttttgcctatatccgtttaccccgaatgtagttgtcacctcgtctaccagatagactccgtttttgctgggattcctatggtcaatcagttcgacttgtacagcagtcgtcaatccgaaatcaccaaaaagagtcaaatctccggtaataccattcagattatattgcttgaaataagcgattgtttcctctacaagctgatccgaattgatattcattttagtagacatgtaaggtactacagtatacgtgctgagatcgacttttgtcttggtgttcgctcccgtagctgtcgtatttccggtaatcttgtgtgtcttttttgaaatctgggtggcattgacaacttgaaactccttgcttcccggtgtatccggatcgtattcgggattcagtcttaccgtaacttcaaagaatttttcgtttgaccccaatgcttttcctgtaacggcaagaaacttaggatcggttttcaatatcttcaagctgctaccagccacgtgataatcaaattgaatcttataaggaacagatgagttgccatcaccgggaaaagtcgggtcgcttttaaacgatgaataaggccgtccaattgcaattttaggcatggctgaagagtcttcctcgtattttaaaaaacaatacaccttgaatttcgaccagtcattcaaaacatccgctacggtaaaattgtccgttatttttaccttcccaatttgaatatcgaacttcttggtctcagaatgcagttcaaatccggtgtccttcaaaagcccgtacttttctccacagacatcatttacttttgttccggaaaccggagtttcaaacttcggagcttgtttgagtttcagtttataagccatattctcacattgcaattcaaatatgctgtccgagttgtaagctgtgatgtaaccgtcaaacatattctttaataccccattgtatcccagcttgatattgactctctgtccgatcttgaacgtagtctcgtcaatgacgctttgagtattccgcttttcaatcaaaaccccgtcctgcatgacttcggtagtaatcaaagaagcatctttcccttcaaccgttccgttaccgacaatcgtacttttgaataccgtccctttgggaaaaacgattttggccgtgccaatcaattttttatatgattcgtgaatctctatgttttgcacttcataaagtgttatgggattcttgattaccatcggattctttgaatcggcatctccgatggtaatctggcagcatagaatatcaagcgtgcttatagccatagttttgtcacttttaggaggctggccggatcaaccacctcggttccgaattttacaattttgatccatttgttcgtatgcttgatagcctcgtccaccacctcttcatctgccagtttcacttcgattgactcggaaggttcaaccgccacacaatgcagcgtatatggctggacattacgataggtaggggctggaagagagtagtcaagtacgatcaacttggatattttaaactggcgaagtatcgtattatcacagtttatggcacatttgaattgcataagcttcaaaaactttgatacttcagcttccggataaacatcggggtatttgcttgtgattttgccggttatgctgatttccagatcaccgccactgataagttcctttctggagtaatcccgtccctgtaccggagtcagcagtatattgtttttgcttgataccgatacttccggttgcaaatcgacaaatttgaccgcttcccctttctcaacggtagtgaccgtgtgtttttgggaatcataatagacacagccgccatctacgctcaattccagataatccatgacaatatttttgccgacaatactgtcagtgtaactcttctgaatcgcaaccgcctgttggtctttaatcagctggtaatattgcccggtcttgttggcaatactggactgcgatttggtttgtaaatatttatccctttccaccttctcccagtatttcaagaaccgggggtatgagcgcaaaagtccataggccgcctgacaagtggtttgtatgactgcccgttttagaatttccttgtcttttgaaaaataccgaacctgcccgtccgtcatggaagagagtccgagtcccaatgtctgtcgtgccgcattggaaatgtatccttgtaagctgccatgattgacaatccccccacttaaaatagtggaggttgccaatccggccaatccttgtcctaaaaatttagccatatattattggtttgtttgttattatccgttccaactcgcatcgaagtcatgtacgacatcgattagagcctgtgccatcatctctttcaaatcctgcatttccggagttttgccttccggggttttcatcagttccacggtctgtatgctgagcaaattggtaatgttcaccacaacctgttttggggccgccgaagagagttttccggttccgctgtaattgccaccagcaccgccatcgtcttctttatttcccaaataagaaatatctcgcttatcccaagaatatttgtcattggaatccggctcgttggaaaacatgtcgggagaaaaaccggctttggtcataatattatatgccatattcgcttgtcctcccattgttgcggtcaatgcggtataggtagctaccaataattgatgtgccaacctgtctcttgtctgtttggcaaccctgtctttatcagtcggatttttaggcaaggctggagagtaccatgttccatcgtccatgttgcgtttccatccaattttctccaattgttgcgaaacagtctttccgctattgatgtcggtcaatcccgaaaccaaatcttgcgcaccggaagaagttactattgcatccttatatttttcagcaacagtaatgatgttgggcaggattttgttgtttatataatccaagtatgtcggtgtgcgttcaaatacagaatatggttgctcggacatgtcttttgtgtaccaaaccttaccgtttttctcaacgtacaaggatttatcaagtacgtttggtgacactccgtaaatttcgtgggctgtgtcaataaaagcttggatgcccgtagcagtgttttgttttgccaaatcagccaaagcggaattgatgattttttgcccctttttatctgattctgccaaaatcatcgttttatatgcgtcctgataggcatttgcaacgtcataaccgttataattcttgtttcctgcaatagcttgcccccattgggaaatcaaccctttccaccaattccctgaaaaagcaacatctcccagtcctgatttttccccaagggttttttcagccgtgagatcttttaccgcttctcctgtagccaaagcagcactgtatgctttattcagagattctgtcagcgcatcgatagacgggtatctgtattttttgttgctgtttacttcttccagaatcgtgcttcgggccttgtttacttgccatgttttatacgcaaccatccccaatatcccaactaacgcagacaatccggctgttgctgccactgcaccagttcctatagcagacagagaagatgcagccccaacaacacctccggaagaaacctgagaggcaaacattcctgccactctgcccatagttcctccaccaagcgttccggcaacagaggtcaatatatttgtagccgccttttgtctaccgataaatccaagtgcaacccccagattggttaaggctccggcaaatttgaatatcttggttgtaacaaagcctgtgatcaacaaaggttccagccatgtcaggttttttgttatccatgtaccgatcttgccgagtatagaaaatacatccaacaatgtctttccaatggtctccagccctttggcgaactcttgtggtttgaatctatccaacaagtccctaagcgcacccctgatttgcggctccatactttcataggcttgcatgaagctttccgagaactgggaggtcatttgcgcccacaagccttttgttgtgttttgtttggtaagtgcaagttcctgggatatgccgttgcttgctttgttttgattcgccagtgttcttaattcctcataattatcaatgaacatcatggctgcattacctccgatcttaccaaaaatagcttgcatatctccaagagtagcaccgcttttgttcaggtcttcaaaaatatcagcaagaggtctcaacttttcaacctgtttcccgtaaatatccctgtattcggtaaatttgactcccaatctgtcaagcgtgtcttgtgcttctttggttggtttggcgaaccttccggacatggctctcagtgccgtaccagccatcgttcctttcataccggcattacccagaataccgacagccgcagaagcctcggagaaattcaccccagagagacgaagatacccggctgccattttgaaagattctgccatttccagaacattcacattggatcgggcaatcgtggaagccagaatatcagcgacagtgttcatcgaagagcttctaatatcatatccagacatgatgttggtagccaaatctgcaatttgagcaacgtctgcatctcctattaaggccagattcgtaatagggcgcatggctttattgatagtgtcgatattcatacctgccattgccaaaaattttgtggctccagcaatttcagtagcggtaaatttggtatcgacaccgatttgcctaacatttttggacatttgttcaaacctgtcttcaaacgtagacaagtccgagtccgctacacggaggatgcttcttgcggtctccattatgttggcatattccaccgcatccgcaagttcggatttaaagaccgaatatccggcataggcactgaacataccggcaaacggcatgttcccccatgaaggaagccgggaatattgcaaacgattgatagctcctttttgccgactgtaatattctctttccgcaattctttgtttgtgacgagcttctctctcttgtcgagcctctctcttcagttggctggccatactgtattcctgatatttttcgtaacgcttctggctttcttccatctctttagaaatcctacgaaaattatccagcttcttttttacattggctcggtactctctttcttgctctttttgtaccttctttaaataagcctcattttctttctcttgtcgagcctccattttcagcttattggccataacatattcttgatacttctcgtaacgcttctgttgctcttccatatctttggttagcttacggaaattatcaagttttttctttatgttatcccgatattctctttcttgctctttttcaattttgttccagagattagtatactccctatcctgtctcttaaactctttctcgctttctctggcaagcctttttagttctctctcggcttcttttattgtcttgttttcatttgccgagacttttctctgaatactggaacgtggactggctttatctgaatcgacagtattggaaataacaggagttatggctgtagaaccggaaccggcaggagggctgaccatatttgttcccaacgtcatattggtagctccttttatctgaccaagcaagctaagaatttcttccagtttctttttggcaacatcggtcttaatattgatttctcttccggtttccagactgacaagagccgcattgacctttccgatagttttatcaattgctttaatcggctctctcatagcctccatagcttgcgaagcagttttctttgatgatttcttagcctcttcttgcgcagccaattcctgatttttcaatacggctttggcttgtgctttgatagcctgggaatccagtttttgtccggcgttgataacaagattaattttggctgcttctgcttgtatatctttgacaagccttaaaaccttgtccagcttttcttcagccagatcggttttaacattgacattatagtttacatctctttttcttccctttggtttaaatatagcgtccattttgttcaccatatttttaacctgtgtaatagctgcctctgctcctttttcgcttattttcagcttattgatagcttcggcgaattttgtaacatcctgaacgccattggtttttacatcaatggtgtagtttacctgatagttttgtatttctgccattgtatgattgttttaatgaagaataggagggtataggcagaataggttgcttgtaaggatcggagaaagatgaaataaacgtataatgtctcttgatattgtacattactacaaaaaaaacaaatcaattattgtataaaatatatttcttattaatggacacaataaaaatatttcagagtcgtttttaaggcgtaaactaaaataaaaataaagttatgaagaaaatctttttgattgtgattgcctttttatctataggcatttgtgatatgtattcacaggttataaagatggaacacggagcaaaccttacatggatggatggcggtggttatgcaaagaaaagaggagtctattcttttatgttaggctgtgattatttagaaaaagattggtttatgctatccagtgagataggatatatccaaagaggtggaaggagcctttttagttatacggaaggatatgatcctgatcgggggcagtatgaatataattacagaagaatagctaaacttgacttctttcaaattaataccacatttaggtttaagcatgattttaaacgctttacattatttatgggtgttgggccgacaatagatattttactaaaagacagaagtgaataccaaaaacagcctataaactcagatcaaattacaacaaccgaaacctcgattcatcacaacaatgtcctatatggattaaaatatgaattaggaattaattatcatatcaataataaatggaatgcgatattaaattttagtcagttaaatagttttaaaggcagtacgattgggcattatgacggagattctttccgtaataaaatagcgacattgtcattaggaattggctatcgtttataaaataactaataaaatataatgttatgaattatattatgtgtttttagatagttatattttaaccataataattcaattctatatattaaattcccagaaggaatgaattgtacttaacaaagcccttttatataccacatctaacaattcggcttgctggaacatgatcgcctattaatgtaattatcgtgtctggcgttattgtccagcgagaccggatatgtacaaaaacagataaacagaaaactgaagatataataaaaaacacacaatatttccgattaacttgaattatcaatgtgtaacaacaagtgtttaagttaccataattatatatcttcttcccttgataatcaagcttcctataatttttcttgaaaaaattgttttttattttgctatttgttttttaatgtctatgtttacgactttaatcgtgtttatcaacaaaaagtttagtatgaatatgagacaatttaaagttttgctattgttcatagccttttcttgttctgtatttgcgcaagacaggctatctctttttattggcagggcaaataaatatgcctctgtggaactttcggattaccggaaacgcttatgtatagaatacaatacccccaacaacttattggatgattattacaggcagtgtggaagagattgggggaatgtgggcttagctcttgaaatagccaaaacgtctggcagacacatgcgtgatgtttgtgattattatagacgttatcatagacatggttgggatcgcattttgatagaaataggtataagacctgggtcaatatattacaattctttttatgacagaatagattaccacagtcattgttggcacgagcattattgttcgtactgtgactaccatcatcacaaacatcatcacaaacattataaaaaacataagagatataaacaccacaagcattataggtgggatgatgacgatgacgattgggatgacgatgatgacgacgattgacgcttattaattttaaaattatatttaaatgagaaaaatcttgatttttttagggctgttatttgtagttttaagtagcagttatgctcaaaaaggcagacaggcgattggattcggacttagttatggaacagaaatcgaaagtcttggtcttggattgaagtaccagtacaatataaccaatcccatacgtctcgaaccgtctttgaattactttatagaaaatgacaatgtcagtatgttagacataaacatgaacctccattatttatgtcctgtgggcagaagcgtcaagctgtatcccttattcggctttacattttccaattggatgtttgatttgggagacgggctggatattgaggttgatggagatcatgtccatatagacaaaggtgacgatcaccacaatgaatgtcgagtaggagtgaatattggtggtggagccgactttgcactgacaagcaattggattatgaattttgaattacgctatcaactggtcagcgatttcgatcaggccgtattcaatttaggattcgcttatcgtttttaatttctcccataacagaacaacaaaagccctttaccgaagcgattttcagtaaagggctttattatatatagaattaagcaagaagcgcattggaagccttagaaatgagcatttgctcatgcaaccaaagagcgtcttccgatagcattgcaaagtcctcgtccgagagactatccaaatccacaccgggaaagtaatgacgaatatagatgcacctttgccggatgcgctggtcgtcctttaccacccagtcatttaaaaatttactatggtagattggcgagtagaaatcacttccgaaagctgtcccatcaaaccgaagaggaacaatgattcgttgtcgatcagctccttgtcaccgtccaagaaacaatcctttgccaaagtcctcatggcttgtacctcgtccttcttggatgcggccataaacttggagaatgtcgggaaattcggttctctcatgtaagctacataaaattccttttcgcctgactccgtgtcaccgaacaccaccatcgggaacaccttgcgatacttgccttcagttttcagctttttcgctttttctttaattacattttcttgctctaatgttaaattcttttcttccataactaaattgatttggttttataaaagaatagggaagaggaaactgcaatgtttgtgggagaagatgattttaagctgacgatctatcccagagggtcagtcttacaagaatgtttttaagttttggttaacttaaaactcaaaattgtacgtgattactaatcactctacaaatcaatgttgattgtaaacgataattttaaatttggtcttacaaagatacaaaactgcaattcatgcacaatatttattttgaacttgtttgatgaaccgtaagctgtgggaatgggaaattgataccctctttattgaatgtatcatatacaatctcgttaatatcaaataacacactccaataatcgctggcttttacccagacacggacggtaatatcaacgctgctcgcatttaatgtggaaagagcaataagtggagcaggtgtatccaatatacgtggatcgtttttgataattcgctgtataacagcccttactttccctatttcttctccatattcaacaccgaacacccaatcaacacgccgtgtttcttgtttgctgtaattggtgatggcgttattattcaaaatcccgttcgggacatatatcatacgattatcaagagtcgagagtatcgtatggaatatttgtatttctttcactgttccgtttacgtcagggccttctatataatctccaaccttgaatggtttgaataccaaaattatcagtcctcctgcaaagtttgataggtttcctgaaagtgccataccgatagctacaccggcagaagccattaaagccgcaaaactggtggtttccactcccagcttgcttattaccgcaaaagccagaatcatattaagtagaattttcaccaagcttttcagaaaagtctgcacgcttggttccacttttcgtttttccagaattttagcaaccagcctgtttatctgtttgattataaaacacccgattgaataaataagacaagcaataaaaatgtttttactggcatttacactaaaatccagcaacttgtctaaaaataaatctaacttcgttgataatagaatattcaaaaacatctctaatctaaaacaaaatgagcgacaaaattaacaaaaccccattatgtgcttgtgttatttataataaaaataacccaaataataagaacataaacgaaaaggagcggtgtatcaacaaccgctccttccttagaattaaccctctccgataacaatatcgaacgggttaagctgaaactcttttgtaatgtttgtatcgtcctgttgcgactccattccgtcttcattaaagatacatcctttaagcgtcacggtagttgtagtccaatcgtccgatgccatcgggttggcaaatgaaacaatcaggtcgaactccccaatatccatcagcgagccgtatgtgcttctcagggcttgctgggtagcatagtccatcgtgatggatgcggtataagtcaagttaccgaaccctcttgaaaccggcttgccgccaagtccgtaattggattcaattttacgagtcttattccatttaatgcccgataccccctccagtgtcgtactgccttcgtcaatgccgagtgcggtagaggcaagggtaatcatgctccaagaataagcaacgttattaattactgccatctgttattagcttttttcggttagtgataatccttcttctacataaatagaggtcgcaaccccgaccggaaccaaatagtacgcaatccttagtgtgtcgtctaccaatacattctgatccgaagcgataacaacactgtagccggaaatttcctgggctgtcttcatcttgttcaggatgtcaccgatcagatttttgaaggacgtgatcttggatggagccaaatatccggtagacggattgaccaaaagcggagagttcacataaggcagcaaagcctgtcttacagccctgcgtgacttgttgatagtcctgtttctggcgattgtcctgaagtccccgtcagaacaagtgcggtcttttgaaacgtaaacgccattttcctttccggcatacttgatagggaagatataccccttatcgtccagatcgtccagcattacgggagaaagcgactcgtatgcgttcaagcttgtaaatttttcattgtcgttcagattcaaatctccgaatcccagttcaatgtcttggaaattatctccaaaaagattgaactgctgcacccaagcgatagattcctgtacgttcgctttggctatacaacccatgaccgaacccaagaaaccgaccggagtacagttcttgttgcgcatttgcattgtcgagatcaattcatttcgagcctgtccgatgataaccgatgtgcggcttgaatcgcagatgcaggtcgggatcttgttcaaatccaccttcttgccatccgaatcatccgtaccggtatttgcgcaacttgcagacaacacaagagaaagaggttggttctgggtagccagaagttccgctttatcattgattgtctttacgatattcaaaagatacgtttcctcgctctttttccataacggctgttccgtccagatgccaagctgtgagatagtaccgcctgaagcacgctgcatgatctcgatagcatcccagttacttgaacaatccgcaaacatcacgtagagcttgccgtatccatcaatatttccactcattctgaagaactcagaaatatgatagttcggaatgccgaacatgaagttcttggtcgcttcatcgccttcatcgcattctaccctttcaatgatgccatagtctttgatggcctgtgccctgcttgtgatatagcacacgtctcccagctttagtttggattcgttgctttttccgtatccggcagtgaaaagttccggttgttttgaaacatcgaaaagcaatcccgtgatcttttcattggatgtggatgtagctgaaggcaaacgtccgtccgtgtctgttataaaaacatttcctaatgccatataataatgatttggttaaaattatgctgtgtaatgtgggtttttgtaaagcttggcttcccctctgagactttcggcggtttcttccgtataagccccacccttgtcgtccacatataaattctgatattgaggatatacctttaatacatcgtcaatatgtttggggatctgaacaggttctgactcctgatcttctgtgttttctgaaacagaagtatcttgtccctctggttgttttacatctgcttctctcacatttaatacggaaccttccgtttcttcaattttcttaggtcttgccatatatacgattattaaaaaagggaatggagtctttctccactcccttttaggttttgattgtaaaaatcttactcggttttcttatatgccgtatgcaccacgatttcacccggacgaacgatattcacatccatcttcattctcatctggaagaagtacaattccgagttggcttgcaaacggtcgattttcagaacctcggtatcgttagcgtaatcaacgcctacccagagatttgaatccataccggtactgaagttgcccagcacgattgtgtgttccggaaccccgacaataggaatgattctcttgcctttgaagcgatacttgttcacttccgtgttctcagaatacttcacctgtttgtcagaaagatactggtcgtaagcatcccaagcgtcccaacccatgacataaaccagattggagtttttgcggatctgtttcggacatttcttccacatcgcatacatcgctttttcgacagccgcaccatccgtcaattcggtattgccagccaaaatacactgaccacctgcttttgtttcagtatcctgtgcgtttacattgtcgataatgcgtttgataacgccatcgaagtatttttccttgccatctccgatctttgtgcatccggaaggttctgttacttttgcacttgcattgccgccttttgcgcttgtccagatcgcattgccgatgtattcgttcttcttgtccatcaacagacgcagcattgtcgcctgaatcttcggatcaagttcacggaataccagattgccttcgggttgtgcgaacttccagtatttttcatagtcacgtgggttaaattccagataaaccatgaaatctgccggctccagataacgttcggtcaacgtgtatttgttgaactcatcgctgctgcctccctgagtgcttgtcggggtcggcacgttatcctgaatgatgtcgccgagtttgatagccggaagcgtatatttatgctggattccgctcttgatgtgaatcagcccttccttatatgtgtcgttaccctgtgcggtataggttagcaagtcttcaagaacttcacctgcataaccgttttgagcaaaatttactgtacttgccattgttagttaagttttggttttagtttttaggaaagtgttttaaactcgaaatccgcaccgacaacagccttgactttctcagccattttttcttccgcagttttagcggcttccttagctgcatcaatgttggccggatcgtctgcgatttcctttgtgatgatttcacgagccggaatcgaagccaatgtcttttcagccagatcaaagtttgcggttgccatctgaacccattgttctttggccccgttttcaatcttgccttcattaatggcattctgaaccatagtctcaattctggcttttttctcgtcagcctccttcttttcgtatacgctcagtttggcgttgacactatccaaatccttttgcatgttctggatggtagcctctttacctgcgataacggtcttcgcatcttccagatccttttgggttgtggtaagctttgcttcaaccgctaacagatcagagatacgagccataacgtctttgacctcgaaagtgccggtcatgccaagcgaagccgctaccgctccgatctcgaatccgatagtttttccttcgttcataatattttctgcttttttgttaagaaattgattgttgtctttttgattaagattagaagattcgttttcggatagtttattttcatctatctccgaattgatcttgcacatcatatcctgaatcatagcagcattgttctcgatgccgtttattccatttcttaccttgtcgcaaacctgtttggatgttttaagcacgcaatcggcagaaatgattccagccttgactgccgcttttgcatcaaagaacgtcccgtccttatccgcttctccgttcataatcgccttgacgtgttctttcgtgagtccgaaacgcttgcggtagatggtttcgatctgtccggtaaaagcctttaccatatccgactgctcttccccggctcccggcatgaagggattgtgaatcataagaatggaataatccctcattaaagacctgtcacctgccgcccagataaccgaacccatgctggcggcgatcccctcgattatacattctgtcggtatcttggaattggaaatggtcgagtaggtggtcatgccatgcaagacagaacctccctcggaattaatcaatatcctgataagagaaggtctgacgcaattttccagaaattcaaattcggaattgaattgactggtggtctcttcggttactctgccgaagaatttgataacagccacctcgccctgtttggcttctccaacaatgttttttaaattattgatgtccatagtgttttaatacaaatagataaatgaaataatatatgtttttcttattcctgcactttgtctgtcagtgagacatattgtccatccgaccacatcaaagcgttctcgtcctcagtcaataaagaattgtatatctggtcttcttcgggttccgggtcggagccatcagtcataacaataccggtcacttcattatatgtaggggatgtatggttatcgtgttggttctcgttatgttccggcgcatcatcgtgattggtaaacggaggcataacgagatactttttcagccattttcgatatttccaagcagaatcctctctgaaccacacttcgtaatcgatccagtatgcctgtaacatattggttgtggtaggcatatcgtaataggtcaaattacacctttcatttaaggccggttcggtgtctttggcatcttgaatagccatgtttatcttctgaaagacataaaaaggataacattccttgtcttcatcctgattgttcaaagtatttagaataaacctgacacgcatggtagcccgaccttccccgatacgttgttgttgtaccagataccggacattggtaaaatgtatgaatacagccggaaaagcgatctccatttccaaattttcacttctgataatcctctcgaactgcccgttgtcaattttgaccgttttaaacagagacgggcttttcggatcttcttcatcctccttgattgtcaatatgatttttttgactgccttgtaaatttcatccaaaggattttttggtactgattccggtattgtgatttcaccattttcagaatcttcctttggcaacttcttttgtggtatcttatcttttatcatgtaggaaatcctttaagcaatacatctttgattaaattattgttcacataatcatctatttcccgattaaatccgataaactgcctttgtacgggttttctggaagaatattggttcacggtgtatggcgatattctgggatcagtgttgtgtatggcagcatatccgatacttttacgtccggttccccgtttgccacgaataacctgtgatttttcatttgtgtggattgtataactggcagatattcttttaaacggcagtttcccgtccgatcttctggcagaagcatcttttctggatgtgctggatgcaaaatcgtttccttcgacaattggaaaggaatctttcagcgttccggtatcattcaggatagggtgcgtgaaccgtttgccccaccgagattcccttggtttccatgccttgccatcaaaactttgtgtatcgaacgattttttgaatactccttttgaatattgccccacttcggtagcgaagtttgcgacattaaaatccagtctgcttggagatattttttccagttgatcgcacatttcctttaaagtaaccttagtcattcttctgtataaatttagatttgatttttccggctatttcttgtaattggagaatcttatttgtcggtatcttaaaataaggatgtgcatcactgaagatttttccaccggcagccaaactttcagtgaacactggattaactaactttttatattttccgatcttttttttgtcaagagaagccgtaacaaacgattcactgcttgttccatccgaaagcagatagcatcggcacgcatagtcgatagggggaatcaaatctaccggaaactcgtttttcggaaaagatatgccttccaatgccaaatgtgaagcccgaactctttcgtccccttgtgtcatataggtaacgatcgagttggaggcaacgcctatccaccagtatgccatagaagcagaatacaacacgtcttcgttttccacagaagcatactggaaattgtatttctcacaaatctcttcgtattcttccatatcctctatgtccaattcttccggcagttcgtttatcatctgaaactcttccgcaaccgcaaaatcaaccagattttcgattgcggctaccaaaatatcccgttcttgcctttctctatccgtaagcgaggaattgaaattctttagcaaatcaaaagccttatcgaaatccatcctgagtccggtcagtacacgatcaatcagaaaagaagccctgagagcaacaatatcctcaaacacttcccaagcttcggcactgttttctgcccgataaacaaatttcctaaactcttccagaatcaatagaaactcttccttttcacgactaatcggttcttctttgggtgcttcgtagcgttcggcaaccacattcgggaatgaagccgtgccgcctacttcattccccggataaaatttgtgactttggatgtttgtcctctcggatgtccgtatctgcgaagatattcttcgtccgacatgatgtgccggtcattacttccatctccgatagcaccggatgttccgattgctccggtcattacattgagttgttttccgacattgataccaaattctttctcgatctcatcacccgtaatctcgtacttatccgtcagaagaccatacagcttgatacggtcttcattgttcatttcgatacgatttgaatatttgaacaccagaccggatttgatatatcccattataacaagacggggaacaatctcttcgttcattatattttcaatgtacctgcgatacacttctatacggtcacgaaatatgtcctgatgcgctttagttgaaccgacataagactgcatacctccggccatagattccgatcccaaaatcagattggaaacctcgctatttaccagttctatcaatccggtatagattttctccgagttcgacattgtaaaagccttgatgtccatttcatcttccaatccggttacgataaccttgttttgcgcagcattggctatatcgttagccagacgttttctgtccgcattgttttccgacacagttttcccatgaatgatgggctggccgtatgtatgcgagaaattgacgtagttggccattgtaaatttcttagccagaataagaggtgtggtggcggaaaacagaccgagatccccggatgaaataagcacataattgttcttgtagacaggagatgtgacatcccagttggggagccatataccctgtcttcttagtaccaccttctgatccggcagcacgtttcttcgctcaacgatattgatatggctgagttttcctgtaagcggatttatatcaggcagaatctccaacaatgtatatccgtacagtttggattccacaattcccttgatcatcttgtcaaactgggaaccctgtatcttttgtgtttcttccacatctttgacatacttgcctttttcgttaatcttcgcaagcatataacggtcgccgagaatctgactttccagagtctctatgaccgatcgtatatgtgcgtcctgctgcaagcttgcctcatacaagtcgatgagccgtgacctgtcgtccaagattgtccccagttctacgtttgaacgtgtggatttatatctgttgtttctctcgatttcccagacatattcctgtatcgtctttttgcttgttctgaaaatactgtcaagtagctgattattaaacgctccttctatatttttactatccataagttatgttttaaaaagaataggtgcgaagcggacaatctgttgtttagggatatgtaaacctgtattatggtgataatgattgttattgaaaattataacatatcgattatcttctctttatataaagatatgttgaatttttaggtatatgatattatttgtttattgtgtcttgtatatgtatttataaatagcaatatatcagatatataaataaaaatacaaaataaaatatatgaaatattatgattgtattatataaagacatatctttgcggcgtaattaaaaaccaaaacatatttatttaaccaattaaagtataccgactatgaatacaggtattgaattttacagacttcgcttcgagtatatgggcgaggacagtgacggaaagttagcaaccaagaaagaagacgatttggtcgttgcggtaaattacacggacgcagaagctctggcgtttgaaatgatggaagagatgaagcaatataatgattccgtcaaatatgagatcgtgaaggcaaaaatccccgaactactctttacagacaccttctccactgacaaggagtataaggaaaactatgtgttgtatttcttttcagaagaagaggatgaagcagccttgtttgcagtgagcgtcaaatacacggagatcagcgataacggcaaggaaaaatccaagaaagaaaacatctacgttgccgcttcctctccgaaagaagcctacgattttgtctccaagtatttgacgaaagttgaaacccgtgactgggcgattcgtgatgtgaagtttgacaaggcttcttctgtcttggtaactgaagaaatgcacaaaaacaatttgtttaaatccgaaaatgccgggctattatgaaaagtaaagtgattgtgtgcaaggagatcaagtatgcggaatttccggatcttttgacaggcgcagatcaagaagggaatcgttatgcggatatgacgcattttttggaaaagaaaggcaagactgggacaaaccatataagtttgttccagatgaactttctttcatggataaatgcagccgttgcagcttacgatgtaccgagagaagatataatcatcaacgagaccaataccgggcacgtgctgattatggaacctcttgaacttctcctgattgcctatgtcgatacggattttggaatgtacatgctggaaaggattgaagaattgttttcaaacggttttgtcatttccgattcagccatcttatcccaagcacaaaatagatttagttctgaacaattacaagatttattaaatggaaaaagaaagtaatggatttttaaaagaaccaaaacaagtattagttttcaatgcagcacaagttctgatagcgattacccggtcggtcagaagtgcttatgaattaaccggaggaaatttacaggctatctccttcgcatgtacaggcaggtttatttccacgggtggtttttacttcaggcacgtatctccccatgtggaaatagaaatgagtgatataggaaacctgaagctgtccgattatgaccagttgtgcggcgtaacccgaaaatatcactcagtaagaaaaatggctcataatagagaagcaagaataaataaaatcaaaaccttaaagtaatgaaagtagaaatcgtaaacaaatcaaaacatgagttgccaaaatatgcaactgcaagttcagccggaatggacatccgtgcaaatattgaacagccgatagtattgaagccactggaacgttgccttgttcctacgggactacatattgcgcttccagaaggatatgtagctaaaatatgtcctcgtagcggcttggcattgaaaaagggaataaccgtatgtaatgcgccaggggttgtggatgcagattttcgaggtgaaattggcgttattttgattaacctttcgtctgaggattttacaatcaatgatggagagcgtatcgcccagatggtaattgctcactatgaacaggcagaatgggaaccggtagaaacgctggatgatacagagcgtggaactggaggtttcgggcattcgggggtaaagtaatggtttgtagcgaaagagggtgtctgccagatggacatcccaatgtaaaacagtggtctgtagcgaaacatatttatgattcttaactaaaacaatatttaaactgattttacagtattgcaaaaggagtcgtggttttaccgactccttttataaatagaacataacaaataataacaaaatatagaagatgaataatttacgaacaaacgaacctatagaattaataaagataacagaacagaacggcaagcgtgctgtaaatgcaagagatttgcattgtttcttagaaaacaaacaaaagttcgctgattggattaagagtcgtatcgaaaaatacgattttatagaaggacaagattatcagaaactttgttttgattataaaggtaacttgttgaatatcagacatcataattttatgaactctgataatcaatatattagcaaaattgaatatgcgttgtctattgacatggcaaaagagctttcaatgatagaaaacaacgataatggcagacgggcacgcaaatacttcattgcttgcgaaagaaaactgcaagaagctaatgtgccatcctaccaaatcgaagataaaataaaaagagcggaaaaatggatagaagaagaaaagcaacgccaaattgcagaagaaaaagcccgtgtgttgcaagaagaaaacgaacgaaaagattcaataattgagggtcttgtttcagaaattcctcttgccgacatgagacagcgtatcacccagattgtccgtaagggcagtgccggagatataggtaaaggctaccgtttactgtatagcgagttcaactataagtttcatgtcaatgtgttcacacgcatgaataacgccctatataaaggcagtgcaatggattatatcgaaaaagaaatgaacaagctgcctgatttatatgatttggcttgtaaactttttgaaaacacttatgaagatttgatggagtcatggggcaaatccgcaaaacgtgccgagcatcaacgtaatttatcacaacgtcaaaaacacctgttataacatgaaagaacaatatacaatcaaaaccaaagagacgttattagacaatatcaaacgccataacgaattgtatcgtaaaggaacgccggaaatctccgatgctgagtacgatgcggaaattgaacaattaagaaaactcgatcctgatagcgactggttcaagcacatagaacctgccagcgtttctaccggcagaaaggtctttttgcctattcccatgaaatcactgaacaaggccaaaagccttggtgaagtaatcaaatggtgcaaatctctcggacttacaggaagaacagaagtaatctgtatgcctaagttcgatggcttgtcattgcttgtaaacgaactaaccggcatggcttattctcgtggcggtgctgaaaatgaggggcaggattgttcaaaacatgtaatggccgcaaacataatgaaggatgcccattaccgttttacttttggtgaatttgtaatatcaaataaaaactgggacaagttcttcaaagacaaattctctcccagtaccggagaaaagttcaagtcgcctcgtaataccgcagccggaatgttgaatgcggatgaaccgaacaaccttatccagcacgcttccttgtatcgttatggaataggtcagtccgatcttgtctcatatataacctatgagcaggtgataaaggaactttgcgaagcttacaaacaacaacctttgttccataaatgcaaggtggaagaattgacagaagagtcactgaaagatttattttccgcatggtcgaatggttatccgatagatggtgttgtaatctatattaacgatcttgccatctgggataaggtagggcgacatgagacaactggaaatccgttatacgcaatcgcttataagcatccggattttacatccgcttttcacacaaccgtcaaatctatcacttggaaagtcagcaaggctggggcattgaaacctgtcgtaaatattgaaacagtggataccggagattgtgaaatggagaacccgaccggatacaatgccgctttcattaagacaaaacaattggccaaaggagcggaaattctggttacacgctcaggcggtgtgattccgaaaatcctttccaccatcaaacctgctgcctctgaagaacaaacagtagtgtggagcaagctttcaatatgcccttcgtgtggtgcgcctacggcatggaatggtacaatggtagaactatgctgtaccaatcccgactgtccgggaagaaaactggcgaaaatcatccatttttttaccgttttaggagccgagaatatgggagaggaaagctacgtcaaactgtttgaagccggattcgattcgataaagaagattttgaatatcactccgaaagaaatccttgcaatagacggttttggagacagtacggtaaatatcatcctccagaacaacaagaaagcattggaagagacggatgctgcaaccttgatgcacgccagcgattgttttgaggggatcggactgataaaggcaagaaaaatcctaagtgaaatgggcggctttattgatcttttctatcaaaagaaatacatccccatgtcctctccgggagattccaagacataccgctctttctgtgacggaatcaaacctttctataaatttctggaagaaacagggcttgaacttcgtccttctgaaaagaaagagataaaatccaacggaaaatgtgccggattgaaggtttgttttaccggaatccgagacaaggaactggaagatacaattattcaagaatggggagaaattgtaagcggtgtgagccggaaaaccacaaatcttatagtcgcagatctttcttctaatagctccaagatgcaaaaggctaaagagttgggaatagcgattgatacgatcgaattatttagaagtaagcatttgctttagtttgtttttaactaactatatattaatatgataggttaaaatagttaatagaaaaaatatttattgatttttctttgatgatattcctgtaatgtatatctttgctctcgtaaaaagacaaaatcactaattatgggaaaaataaaaggagaaatagtagaatcagagcctcttcagatagaagattttaagaggttattggaatgtctgtccactgacaagaaatactggatcgaattatattgcagagtgtcgttctgtacggctttgcgtgtatcggacgtattatctttgaggtggatagacattctttgtaaggacgaaatctgtattacggaaaagaaaacgggcaagacacgccttatcagaataggtgagacaaacaagaagcgaattgccgaattatacaaattgcttggttctccggacttggaactacctatcatcaagcaccccaaaaaatctaccgcatatactgaccggcaaatcaaccgggtattgaagacactaaaggaagaatactctcttccgatcagccggatctccactcacactctcaggaaaacattcggaagatgggtatatgagaaggaagggcaaagcgaagcggctcttgtattgcttagtaaaatgttcaatcattccagtattgcgattacaagacggtatataggtttaagcaaggaacagatagacgatgtatacacttcgatagatttttaatgggaaagaaaatatccggtggcgatataggacttatgatagaaccaaatcctgcttatatcaaagcattggtgcaaaaagaactgatacctacacagaaaaagtttatggccgcagcattaaagagtctttgtctcagttgtgagcatgtggattactgccccaagaaaaccgaagaaatcaaatgtatcaggttccagaattatttgactcactaccagaatcttttaataaatgaaataatttaagaatatgacaaaccaaccaaaacccacattcataatcaatagcgaaatgaaggaagctattgatttagttttaaacacgaataccaatgtgtatctgacaggccgggcaggaaccggtaagaccaccttgctcagatatatactgggtgtctgcaagaagaatacaataatcgcagccccgaccggagttgcagcgataaatgccggaggtgtaaccctgcattctctcttgaaattgcccttctcaccttacaaaccggctttcgtcagaggcaaaaccctccatgtattaggctcatacaaattaaatgacaagcaaatagaaactatccagaaattagaattactggtgatagacgagatctcaatggttcgtgcggatcttcttgatgcagtaaacgatgcgctttgtttctacaggaataccaaagagccgttcggaggtgttcagcttcttttgataggagacctttatcagcttccccctgtcacaataaaagaagaatgggggcttgttgagaagtattatgattctccttatttcttttgctcgaaagcgttaaaaacagccggattcaagactgtgagtctcagccatgtgtttcgccagtctgacgaagaatttctccacttgcttaatgaagttcgtaacggaaacctttcagcggaaagcagaaagaaattacttgaactttatgataagagatatataggaaacaaagagagcggatatataacgctttgtgctaccaataagtcagcccaaaacataaacatggataatttagcaaggctggaaggagaaatttaccgatatgacgcaatactgtccggtgattttccagagaacgcagccccgtgtgaacctcaattgaacctgaaagtcggcgcacaagtcatgttctgtgccaatgaccaagccccgatggagcaacgaaagttttacaatggtatgcttggggttgtggaggaaatcataaacgatgatctattcaactatgtcgcagtcagaaccgataagggagagaagattatcgttaccaaatatacttggaagaatgtcaagtacgagtgtgatgctgaaggaaagattgtagcgaaagaaatcggttcttgtacccaataccctctgaaactcgcttgggctatcacgattcacaaatcccagggcttgacttttgacaaggtaatcgttgatgccggaagagcgtttgcgcacgggcaggtttatgtagccttgtcaagatgccggacattggaaggaatcaaattgatttcaaaaataaccgaccgccagattatctgtgacaggaaaatattggaaatagaacagaaccaatgaacatatatcagaccgtcccccgaatagattgtgttcgttttgccaaatgcaataaaaagtctctggctcattgcaggaaatatcggaatacagatagtgaatgtaaaacttgccagctgataaggaagcgtattagtaacaaataccagacggaaaatgaagtatatactaaaaaattgtgttcccagtgtggtcggtatttgccacttcacagattttatccgagaacaataaaacgaaaagataaaacttaccatacatacacaagtgcttgtaaattatgtatgaataaaccaaaacaaattgtatatgaatgataaagagaatcaagggctgactttccacataagtccaaaccaaacctttctatgtgacataaacatagacagcatatcaaaagacgaaaattatttgctgattaagactggaaatactatcaaacgtctgaaaatatctgatataagacaagctatacgtcttgtaatggaaacaaataaacatgatacaaaagacattaccagtacgatggaagtggctgaaaaagatatgaaaaacaaagcccttaaagcattctgtcggtcttgtataagatataggccatcggacggtctgtgtctggatggattttgtgaagattgttcgatgcctgttacatattgtacacaatgtatagatgcaaaaatggcagacgattatatgtgttatcgaaagaaaaaatttatggaacaattaaatgaaatcaaatgaaccaagaagattttgtaacattagaaacagccgtattgctgaaactaaagggtttcaattggccatgtgaacatagatacagaaaagcggtggcagagattaaaagcggcgaggttggcgatgaatatgtatattttccaaaacctactctttatgtggcacaaaaatggctgcgagaacagaagggcgtacatataagcattgattataactttcctaccgacaaatggttttatatgcttattgatattaaaaaagggagatgtatgcagttttccggcaatgaatatttttcttttgaggaagctattcaggcaggaattttagaagctattaaaatgacataatgatgaaatataagaaagaactggacgacgaatctaagatagccaagtataaaaatttggtaggaaaatatctttataaagcccccaatgtatataaaaagattgtcagtattgatcgtgtaagtgcaggggagtgttgggatgtgatacattacacatccgtaacggtcatttatgatataaataccccctttgcaaaaatacagttgagcaactatggactgatagaagattttgaaattgaggaacatttaacaagcaaggagaatttcgagaaagcgtatcagaattgtatggatttaataaaagaagttttatgaaaagcatttattcggtctattcttattgatttttgcaatagtgcacgatacgccaacgggatacgaacaatgaacgaattggagaaaaacaaaacctatatcatgggtaactacatgattagaatgaatgataaaggaatactaagaataacatcggataaaggtgttattctcgtacaaccaaaagccgataattcaatagaaataaagtataattaaaatctggaggataaattatgaaaaaatacaaagtgttatttgccgatcttgacggaacattgattgaaacagccagtggaaaaaactttcctgaagggatttgggatatgaagatcaaatttgatgtgcttgatgcaattaaaaaacttgcaccggattgtgtatttattgtaagcaaccaaggtggtgtagagaaaggatttgttgatgagttttccatcagctgtaaatgcctttacatttcaagggttgtgaaagaatattgcaatataggttgtgttgttcgtgctaagcagtgcatatcgaataataaaactgacaaatacagaaagccgaataccgggatgcttgaatctttttttgatgaatatatggacaagttcaactttgataaggatgatgcccttatgattggtgatgccagtggaaagaccgggcaattctctgattccgacaaaaagaccgcagaaaattttggtatcgactatttggatgttgaagattttgtcggcatgatgaatgcgaccccatgtttcagtgaagataaataaaaacacaaatgaatctgagaatagccaagaaaatatatgtttatcacccgaaacggaaatggaattggtttcgatatgataaggcgagagtggtaatttatagatggttaagaaacaatgaaaaacctaatagataatgaaaaaagaattaattcaaataaatacagacgctttaattaaagcatataaagaatcaagtaatgattgtaaaaacactcttgaatctttgtttggtgaagaattattcaagccaaaagatataactgaacgcatcaaaacattcgatgatgcttataaggcattgggagagagtcatccgtatgtggttcagtatgatcaaatttttgcatgtcttatggatggagaagaagaaatacctaaagatattatagcttatctgaaactccgcatcatcgcagcagcactcaacgagggatgggaaccacaattcacaaagaaagaaaagcgatactccccttgcttcgtgtcatatactcaaaaagaaataggcgaaacagacgaagaacagaaaagccatgtggcatttcggtcgagcagcaatgcggatgcgagtgtcggtattgcgtgtatgagcacgatctacgattcatcggacgcaattgcgagcattggttctcggcttgccttcaagtcaagcgaacttgcgaaatacgctggcgaacagtttgttgagatttgggctgactacgtgtttaaaccataaaacaacaaataacgaaaacaaaacattaaaagtaatcaaaaaatgaaagcaagaatcaaaggaaccgaagatgttataaatgtagtctataatgagcattataaaatgtggtatcatataggcacggtgtgtttttactttgaagatcaattggagtttctttataacgattctcttgaagagaaggagaagaccggcgaagagagcgacaatattgactgggaacatcgcaggtatgaagttgcaaaggaagccatgcttcacatgatagaccccaatgtgttgactcaaaagtattgtgttatggctgttaatgcggttgaatttgcgaatgcacttattgaagaattgaaggaagcaaggagaccaaaatgaagaacggtgataaacattgtagttactgcatttattacgtggcttttgctaaccgccaaatgtattgcaaggctttactacgaagaataacagcaagaagagacgctaataattgtaagtattataaatcatatctattaaaaccgaaaagagttgaagaatgaaacgagaagatattgaaaaagcggcaaaagagtttaccgataaattgattgcagaaaatcattatgaagtaaattacgaagaagataactacgatgctggtagtcttcatgctaccgatgaagtcggtttttatgctttcacaaaaggtgcagaatggcgcataaactccgtgtggcacgacataaataaagaaaaaccgcaagatggaaagcaatgcttgttagaaatcacatacaataacggttatgtcccatactatcatttaacgcaatggtatgaaatgaatgaatttgtttttcatgatcgttgtgcaaaagttcgttggacatacatcgaagacctattacctaatatggaggactaaattatgaaaccaatattaaatactgaagatgttgagaaattaaagatagatgaacgcttaattgaatgttcttgcggcaaagtgaattattatagatttctatgtttccacccacgaaacacgaattatgtaattctattgaatcattgcgaagaacctgaaaggttttttgttcaaagccttatagaccggttctatacaaattatacaactcgtgatataattacttatcgtagagattatgccattaagaaactcaaagagtttgaacaagcattatctgaattaggcgataaaaataaattggagaactgaattatggacgacacagaaaagatgaacaacagagaaaaattagcgatagctgtattttgtaagtattttctatacgttaacgagtttataacttttagcaatttcaaaaaaatccacgacagattacgagattggcagtataaaaacaaggttaaggttaccgaagcgcaacttgattctattgacgtgatttacgatgataatgcaacttatgatgatgtaaaagaaaataaaatatgatagaagtagcaatattaatcgctgtacactttctaagttgttactattggtatcaggctgggaaagacaaaggaagaaaggaagaataacttatggatttcggacaagattatacagatgatgaaaccgataatggatttgataattataattacgattaagcaatatggaatttaaatcaagaatatgtacaacacgtgagcagtcggaaaggctgctcgctttaggattgaagctggaaacggcagatatggtatatcatcacacaaatagtagagttcctgctttagagtgggagctgcaaaccaagtcgccaacattaagaggtaagttttggacaccagaaagaatagccaaactaaaatttccatttcacaaacaccctgatggaacaccaatgactggtgaagaaatctttgatagcctgtggggaaaagacattcctgcatggagtctgtcaaggctgttggagttgttgcctactgaggttccagatccaaaaccgggatttaagcctcaccacccagagttgacaaagaaagcacaaggatatattctctcaataaggaaatacactgccgattgtctggttggcacacacatagaagatgatccgatagaatgttgcatttcgatgattgggtggttgattagacatggttattttgacaaacaatatttaaatgatagcaagaaatgaatcttatagacacatgggttactgaggtaatcggggaaccttactatgatgattatggcagtggaaattataaatggtggttgaaagtcgcttacaaggatgtaggtggtactggcactacaactttaatgtttaatacgaaggaagaagctgaagcggttcatccaggctataaattccttcattaatcagaaccgaaatgacatatttattatttatagtaataacgttattagtaataaggcatttactgaaaataaaagagcaagacaaatgttcccagtgttccatgaaagaactatgtaaagaatgtcgaaggaacggggatgcaccgccttgcaaacaataaccaaaacaataacaaacaatgaatgaattaatatttatcggagccatcgcttgttgcgctttattgatgattttcctgtatataagaacaagtatttatgacaagcgtataaagaatcttgtaagccatacgaagtatctcatataccaatccagatgtgctgaaagaagaagcctgcataactcgtatatgatgctttctttcgtactggagtatgcaaaagagcatgagcaatacgagagctgtaagatcattcaggataatatgaacgagatacagaagcagattgccgaactggacaaggcgaatgtgtaaagaatgttaatattgaaaaccaacaaacacaatcaatagcagtagccctattattaattaaagaacaattaaaaatcaagattatgatgaaattgaagaagcgtatgacattcgaggaaatgtcacagcacatgttagaaaacagcaccaaagttcctaaccgggtaacggtaggaaaatacgccagagaactggggtataaggtttacaaaccgatggtgaactgtaagataatgcactattatgttaatgacaaaatcgaaaacgcatgacacaacaaatccagaatactaaattcgtaaagattcaccctaattcaagttgtctattcaaggcaaacgaattggctcttttgatactcctgttaaatcaggagtatcataaaagcgttggtcataatacaaaatggagccgaaccacttttaaacagttactaaaaatgagcaacgattctttttccgcttgtgtaaaccggctggagaagataggggtgttgatgtctacagacgcaaaggccggatgcaagaaggaatgttcactggatatttctgggtataatattgctttaagaatactggaagcaaccaataatcgtgaagccttatccaagttttgcgatgataaattcgtaaaagaacagaaagctttgagcaatgtttccgaagaggaaataaacgcactgaaggaaactgccatatcaacaaaggaacaaaccgtacctgaaatcggaagggttttgatggaaccatgtaacaaatcggtagggttgtcagagaacccttcttatatcggaatggttatcggtaaaccctacctgaaatcggaatggtctgacggatttattcaagaactggatgaagcaataagtcatctgttatcaatcagagaaaaatatgtgcagaaaatcggaaaggtttctgaagatgaaaatataaccctacccgaaatcggaaaggttatggatgaacccttccgaaatcaggaaaggttagagtgcgaaaatgaaccaacccttccgaaatcgggaatggtttctttaaaaccgttccgaaaacaggaagggttcgatggtaaaaatagcctaacccttccgaaaacaggtatggttttggacgaacctttccgaaatcaggaagggttatctgaaacctttccgaaatcgggaatggttcagggcaaaacctttccgatttcgggaagtaatatagataataatattataataagcttaaaagaatattttaaagaagatattaaaaagcttaataaaaaaggttacgaagtaagcttttttacaaaggataaggataggggtgtgggggaaggagaaaccaaaaatcttcaattcgaggttcaagcccaaacacccagctttgaagaaaaagattcaagcagccccttcactcccagctttaaaaaaacagaagaaaaggattcggatgcttcctcaatccccagcttcaaaaaagaggaagaagaaacggttcaatccgaggtttcccaaactcccagcccaaatcaaaaattcatcgacatgcttatccgggacatgatggaagagtaccctgaaggagatacccctaaatggatggaattgaagaaaaccttcagtgaattgaaagaagattatttctcacacgatgaagaactctccaaattggaaatagaagatctgttcccgtattttgaaagcagaggatgcagggtaggaatccactattcggaatggaaagagaaaaccgaggaagagataagggaagagttcatgtcactcccagtttccgaaaattacgatgaaagcttaatctcactctcagacgatgaaaagatagagatgataaaggaggatttcagagagtctttcccagtcgatgaaaaagtgacattggatgagatgcgccagttcgtagtggagtacatgagagatttggaacttctgaggataggaagggtgcaatacgacaatccccagcttctttccttcatgtttccggaacttcagatggacaaagaaacgaaactctggtttagaagccaaaataaagcccgtggtgagacgatttgcagtgatggcggtaagatgatcgaaattcaattaaagttccgtgaagaggctgaaaatgcccgaaaacaagagaaccccttttacaagaaactggagagatatagatttcccagaatttcgataggagagaaccgggattgccaagctatagagataataccgaaactcctttccgacatggggtacaagaacggtgacatggaagactgggatactatctctcagctattggacgtgattatagaccgctacaagctttacggcagcggattcgagccattccggggaatatgggtttatctggacaagtacgaccacaagcagaaagggaaggtgcaggtaaggaatctgccggaaaagtaaggggtggagaaacaaagctctcacaccccggccttttgtccgatttgaagttttgagattcagtcaaggggttatgttgcaattccccttctcagttctcctaatccttctttctcggtctcgcaagctgttcctttctaaattcgcttatatggtcgatcatttcttcgatttcttccagcgacctgaaataatttccgctgttgaacttcagcttgtcttgtgtactgtaagaatcctgtgccctggagggggaaaacttatcgttgatgaaatagtaatattcgcctttgttgactctgaagtcaattggttcgattcgtttgaggtatccgttccaagcctttccggattttgccagttctatcttgaaatttttcctctctatctccgtggccacaaagaagtcgtattcttcctgccttccgatattgtcctttaaagaatgtctcatcggttcgttttccagcttgacacaatacatgataacacacccgtcctcagagaatgcccgaaaaacgccgattccgcccttttcagacacttttgatctgaatctaatataattgcactcacggggaacgaaacgctctgtagcacgactaaaatcgttattccactccagtccttcaagcgaaagggaatggaggatgttttcttgttcctcttcggttgcctgtctgatttccgatttgaacgggattgagattttatccgtaatcaagtccccggttttcataagggctgctcccagtatcagggaatcgtttttgactgatgagatgattccggttacgccggagtacgggccggaaattatagcgatgaatgaattggcagatatatattccctttcaatccattttctgaattgttcaaatgtgacggtaggagcatgaccatccggttccagcttcttgaattttatcttcaagtcaaagttggaaaggcaatactggataatggcgtactcgtttccttcatcgctcggaacaacgaatttcagatagtcttttatttcttggttcgttctcacagttatcaagtttttgtctggcaaagttagattttttgctcttataacagcccaaaatgtcttaaaaatccggtttttgtaagtttttagccaaaatctcgccaaaactgaacaaataagtaaaaaaatcggggttcaaaaatcattttcccagttccttctatcaatatcctcaaatagcctttgctttggcgtatacggactttctatggcttgctggtatgtttgtattatcgagataataaaatgcgatacagggctttaaaatgactcgtttttattctgatggataaaaaggggttcagggaggtatattgatttatggataagctggaggaagaggcaatatcagttgtatttttctccccaaaaaacgagacttgaaaaatggggttccggaaaaaatgtccctttatatataatagttattttataactatagtgatttaatatatgctaaaaacgagacttgaaaatttggttttactacaaatattgaatccgcaccagccaaagtacccacttcattctttttaaaattgttactgcattgataatcaatataatacaataaataaaaatgtctttttttagcaaaataagactttttaagcggtttttcttcattcatagtaatagattgaaagcaaatataaaaatagtatggttgttttgtaactatgttttgaaatagataaatgtaatatattgatacatagttatttaataacgatagaaaataacttttgattttacaaatgaatagaaacctttattttaaggaaaaagcgaaaaataagatttaacatttcaaacataaacagctaatagtcaactaaatataagttttaaaatgttaaaatagtccttatatacctattataaaaagaaaggaaaaagcaaccgaataaaaaaagttatcgaaaaatttggaaaagtatattttcgaatattatattagaatcgttcggttaaggaaacaaacaacgaaacaaaaaccaataaccgaaacaaaagcgaaaacaaaataaatgttgaatcagccaaacgaaagagtaaggaactttcaaaagtgcatttgttcattgacatattgaggcaatataacccgttattaaggaaacgacaatacacgttataaggtgcgaaatgcatacacgtgttaggtataatgtacctttttcaactgataacggcaaattatatcgaaagctcacaaaggtattgagtattagggtgtactgtgccctatcgtgacaactcgactaaaagccgacgggtgaggataggcatgttaaccgcgtgtgtaagtcctataaaaacagcggtatcagaggcgtattgtgccctgattgatagtgtgaaacgagcttgcaaaggtagcgttattcttaggtgcaattttcctaacacactgcaaataaattaattaataacattttaaaattatacaactatggcaacaaaaaacgtaaaaaaccagtctgtaaactcaaaagtaagtgctttaaaatcaattcgtgaagcaaacaaggaaacaaaaagtttatccggcgttattaaaaccattcgttcgttctggaaggaaggttataaagatgcttttgagggatatttaggcttgtcttttaaagatatagaacttaaaaatatcgtattgctttgggctgatagctattggaacgaagataaaaccaaaatgttgtatccggcaaaagtcgcaaagaaaaacgaaaataacgaatacattttgaaagacgggaaaaaagtgtatgaaaaagtaatgaaagagtataaccaaaattttactgttatgcgtgtatttgatgcgcttttacaaggtaaaatagaacgtggcgaaatgaagttgtaatttgcttggaaacgtgtgtctaattatataggggtgcaatgtgtctgtgtggataattgcacccctattgtgtctatctgcatactacaaacattcgtgttacgggtgtggtgtactccaacgtgtcggggcgttggtatgcgcaaatgtataacaacttaaaatttagaacgtatgaaaaaattcttgtgtggtatggtggcagtgtgtgctatcattgtatctgtgtgtgtgatatatcaagtaaacgcaaaagaatcaacgtacatggtgcgtgtgtccgaattggacgggtttcacgtgtggagttttcgggggtatgcagaagcagtgtataacggtgcatcatatacctccagtacgaaaatgttcccgtggggtaaaactgcaagcaaattgactttgcgtgaaaaagggtttgtcaagcaaattgtggcggtaaattttgaataagtggaatattaatataagaccaatgaaaacaataaaacaattaaaagtgggtgacttcttcaagttgcacccaaacggcaaagtgtatgtaagaggtgagtacgaacgttctttgaagcgttattcgtattatgatttcaatgacgtgaacaacgagcatttttgccgtggggataaaagcgtgattacagaatttgaattttaatgtataataatctaaaagaaaggataaagtatgtttatagtaatgatatttgtcttcattgcaatactgtttgtatcaggcacagactatgaagacgtaaaaaacttcatggataaagaggattgaagcgtatctgcatatcacgaatgcctgtatatatcactgatatgtaggggtgtggcgtgcttcagtttgtcggggaactgatatgcacaaacacaagcgaatttgtataatttcgccgtgaaatttgatgtttaacaataaaaactttacatttgtatggacgaaatgtttaaagaacttggcaaatatatgatagatgtttccaagtatgttttcacgactattttattgtctgtattgtttgctgataatagtaatatgtcgttgtatgtagtaacagccgttgcggtatcaatggtgttacttgcattagggttagggtttatcaaagattttagcaaaggaggcaaagaatgaatgcgacaatttatttattaatgatgtttgctgctattatggcggttgctatcttcgtcaaaagtccgtgggggcgtaaattctatggttatgacaaagatggtaataagatagagaagaaataattctcgaaatccaatcaatctgtaaaagcactcacaaatttctgtgggtgcttttttcataggtgcttacatggtgataaactgggtgtccctccagctatacgggttcgattcccgttgcatctgcactttataacaacttcatattaactacattgtgtcgtgagacacgcattatcctacctacttaataacacaatccgcatagtaagtcagggacttttgaatcgtacttaactgggcgagctatgcgcttgtgttgttcttgtattaggtgatgcaagctatcatgtattgcatgtagttaatgtgtggtaaaaatggtttggtgagtaacaattcactcccagccttatctattcgataataaaactaaaactgatatagtatgtgtaaaatgaaactgactgcggtttacaataaggatattgtgctgcaaaatgagagatttagtgctgcaattatttatcgtggtcgccccaaatccgacacacctaaaacctataaacaaataggtggatttgtagcaaaagaactatccaacgcttataacagcggttgcgtatctatctataaagcaaaggataataccctcagatactcagtttatcaagatggttgtttttatccttattacgggaaaattgaattggtaaaataaataatacggaattatggaaagtatgtatttgaaggcagaagacctgcaaaagttttggaacgagcaccgttcagagtgcggtgatgatttcctcagagtaaaaaatgtgtacgattatgataaccaggcaaaacgctatgccggtctggaggtaagcggttttacccgtcttgttacagtgtgcaaaatagaaaaatacgctgcaaacagctattcgtatgaacttggcaaaatgacagacaaccctccaatgtggcatcatgaagttgcattttgggcgttggaaaacataaaaacgggggtgttgtattatatatcaggttcacatagagacacaacatttaatcttcgtttgttgaacgaaatggacgttgatgggttcggtagtgagttggaagctcctaataaagtcggcaaagcaaccgaaaaacgcctccagcaatggttcgattatctcgatactgtggaagcggataaagtagagtttgtgcgtatccgtgacgaacgtattgcagtctttaagaagcgtctggaagaaaccgggcttgaagtgatatggaacggcaataattgcggaagaatcgagaaaggcatgtttacctataagtttgagttttaccataatggaaacgttcgtgaaacgtgggaaaagaattataagggtgtgacacataacgaccttaaaacattcttgtcgttaccggaataaataaaatattaacctaaaaaaatacgattatgccaaattggtgcaatacattatacgtcatagagggtgacgtagaagaagtaaaaagtctctatgagaccatgaaagaattacaggaaagaaaaactccgcttgtaaagaatgattttgggaaaacatggcttgggtgtcttgtcaatgcactgggcggtgattggaatgacatttattgtcgtggtgattggaatgaccttgaaatgattgaagacacattgcggttctcaacacaaacagcgtggggaacgtgtaatgaggtctttgactttattcgtgaaaaatttccaagtctttcttatctctaccagtcggaagaatcgggaatgggggaatattggacaaacgatgtagagggtaaatattttactgacaaatatattgtcaacctatatactccagacgaagagtacgaagaagaaagatttacggacttgtcgggagcgtttgaatatcttgaagaaattagcggtcagccgataaaatcaaaacaggatgtaaacgcatttgttgagcagtggcaaaaagagaatgaggatgcgttttgtaatattatagaatatcaaatagaaaaatagacttataactaaaacaagaacaatatggaaaggaaagtatcagtttacccgttaccttttggagcaagagtatttatgcacagaaatggagaaattcgtgaagcggaatatcgtggtatgagaataaaagatacaggtatttgcggaaagaacgtggataccgaacacatcttttggtttggcagcaaattgggagaggaaaaatttaaggtaagtatgcccatatacaaaaccgctgaagatgcagcacaagaaactaatcctgtacaatatgagatgttgaatatagagtctttctctttaaaatacctatcgcatcttgtctgggatggtatacagttctgtggctggctatgggatggttcaagaccggtaaagagagcagcacgggaacctttaagggtttgtgaaatctatggaggtgaagttaccttcgttgattatagtggaaacgagtatgatgccgaatacttccagcgattctatcaaaccgcagaacaatgtcgggcagcacacaaaccaaaaattgtcatgctggatgaagaagaggatgattttgcaaaacagaagcgtgatgagttttgtgaatacgtcaagcatcattgtcccagctttgaggataaaatcgagtgggaatattttcaagcatacaagactatgccgtggaatttgtctcaacaagtaaagttttggagtaattatgggattgcctttaaatagttaggatatgacatttcgagaatttatgcaggaaaccggctatgacctgataactaccttttgggaagatttcagcatagccgacaagtatggtatagcaggtgtcaaagatacctacagacgtgcgttcaatgaatggaaagacgattataagttcttcacggaattaacgcttgtgttgaatcacaaaatctggcaacattgtgaaatcaattgtgaactggcagctttgtatgaccggttatggcgagaagctgatgagtatgctatgaataactttaagggagaagaacttgattattattacagaataaccgattagctatgttatacccgttttcattgacgcttgacttatatatacaagccgaatcgtttgaagaagccaagaaattagcggaagcatacgttcaagatgcttcgttagatacgattgactatccggaaatagtgcaggatgtattggaagtagcagagtatgaaataaccgatgtagaataacaaataaccaatattatggcagtaatatgtacaaaatgtggcagcacggatgttttgtgtgaagcccttgttaacccgaataccgaaaaagtggtaagttatcatgatggagcctttatgtatggcttctgtgaaaattgtaaggacgaatcagtgataacagatacaaatggtatcaaatgtgatatggaaatcagttacctgaagttctgtaaagtcgagaagaaagagccggattatgcggaatgccaaatagtctggaaagaagacgggaaagacgagagagtgagaatcaaattatcacagaatgtggatgaagccacggatgatacaatctttttctattgcaacggattggaagaattgaaatcccttgcagaatttggtggggaagattttatagtgacagatttttggaattttattaataaatcagatgattatgaaaaagacagtgataaccgatgatttgatagtatttagtgacggatttgtttggaaaagattatccagaaaagccgcagaagcactttggaactctgttataagtcatgagttagaattgtattgggtgcggactgatgatgaatccgaagctgcaattgaaaagtttaatgacatggaaagggcgtttgaatgtggtgattatgtatgtatagaagttggaaaattgccatacaatatggcttttggatatatccgcaatttacaggaaatctcatcacaggctatatcccgtctaacagacactaaggattggagtcgtgatgtggcttttgccatgattcgtgtatgggcaaaagagtttactgagaagtatgaggattataaatttgatggagattattacgatttggtggatgaatttattgatgggaaattaagcgatttagacaactatgaaacgaactttgaaagaattacaagaactctgggataaacttggtgatattccagtaaacaatgatgatgagatagaagaagactttctcaatttcccagccggaacctcaaagtttgatgtgtggcattggtttgatgaacgatgcccgaacggagtagcagaagatttgatgtataacgaagaaaatgaatataattaatatgaaaacattagtagatttatttaatgataatgattttgaacctgaatatttattgctcgaattgacaaacggcgaaacagtgagtggtataattgtagatgaaaggatcgatatgaaatccggtacagatggaaaatatatttatgacattcgacaccaagatgatgatgattctattcctgccgtaatcgaaccgtctgcgagagtcaatagatattgctccattgtacttgatgctccgcttgatttttccagcgataattttatagaaatagcggattgggattttcaaagttaagaaaacatagatttaatacaaacgattaaaattgaaagatatgaagcataccgatttttacaaactaatagaagaaatcaagttacaggaacaatgtgaattaaaagcagccatcaaatctgtcggtggttgctatatatgggatatatatgatggtgaagccgaatatccaatcatagcagtaaacatggatagtatatctctgaatccgacagatgtggagatatatgaagttcaaattgtgaacaatgtgcttaaaataaagggaagagacaaagaaagcagagaagtagtagaatttgaaccgaacgatgtattcgccggacacttgtcgtacatcatagattatctgccgagtgacgaggatgtgagtggtgcaaactaaaaatggagagttgaatatggcaacgaaaaaatttgacagaaccgtgtggcatggtacggatagcgacaaagttaccagcctttttgagtatgggctattggtgagatatattaccaaagaaaaaagctggcaatgtatataccgcaatccttatgaaccaaataagttttcgtacagttggataagcgaggaagatatgcgtgagatgtttttgacaggttgggcaaaagatgatttgaagtcgttttgttcctatgtcggtgatacttggaatgactggttgcttcgtccggtcgctacaagaatatatgatttggtttcctattatggagcggaagagatattcggaaacagttaccggacttacacagcaaaagaagtttgcctcagtctgcatataaaatatatggaagaatatgaaacagcgtgctgatacccgaaaagcatttgagtcatatctggatggaatcggtctcagcttgtcttccgaagaatggataataggcggcaaagaccggtcacgctctctgtattatggcaggatgcttagaaaacatgacccgatagcttttgaggtcggatataaagaatggttgaatcaaaaataacaaatgataatatgaaaacaataaatctaaccctgtttagctttgatgaactatcagaaaacgtacaaaagaaaattatagagcgtgaacgctggaatgtgatggaacgatgtgtggattgttgtgcttctgaatataaagcgtcattgaaatcttttgaaaagctgacggataccgaagcttgtgactggaatgtcggttatagcggatatagttttgattttatgtttgacgacctactgtattatgaagacccgtatgattgtggccaagacatttgtcttagcgatttgcgtggtaaattattgtttcgctatatcaataataatattatgccgtatatcacaaaaggcaggtattattccaagggcaaatatgtagatggcaaataccaatataaagacagacatagtaaaatattgctggagaataacaactgtcctttaaccggagtatgctacgaccaagatattttagatccgattatccgatattacaagacatggaacagttatccggaagatttttcttggccggatttgatgagacaatgttatgacaatttctttaagagttggcatgaagaatatgaatattgggctgacgatgagagtgcgttacgagaggaattgcataacaatcaatatgaagaccgcctttattataaaaatggagacgtatatgttggacaattaaacgaaatagcatgaaaacacaaaaagaatatgcctataagattggtgaaatcgttctcagggatgtggaaagttgccagagtgactggttccttattgatcaggaaatatttatgcttcctgaaaaccggaacaaggcatttgttttgggaacccggaagaccggatgtgatttaataatactgggtggcactaattgtgatgaaggtagtatggattggctttttgggagtcttggcaatgaaaatttctatgtatgtcagccgttatctttccaaaaatcatcgcaggaaatcgagaaagtgaatcccttgtacgcttttaagttagctactgcttatttcaggggacagggtatggttccggtatttgaagattgtcattgcagactggtgaaactatgagtgtagaagtgataagatataggcttccggtttattgggcttgcgctctgataaatgatgattataccggactggaagataaagaatgcgagaaaataaaacgcttcttagaaatagcagaaggttatccggtagatgtagattgggaaacacaagggttttaccattgtaatgacgcaggaacacttcctggagagtgtgcagattttatttttcataaaatttaaactatgacgacaattgaatcaattttaagccgactgaccaaggctgttggcggtactgaaaagatgctctacacagagccggagttgaacaaatttgctaagttttatcttgataagtgggacgagaacaccagtgaggatgtcatagccgaatctttcactgacttttggtgggacacagacagggcttgcagaagatgttcagagtgtggcagactgatgcgtaagggctactgtatagatgcaggagcagcctattattgcagtgacgaatgcttgcacacagattttacggacgaagaatgggcagaagaatatgagagtaatgaccagagttattatacagaatgggagtaaaattttaaatcaaaattatatgggaactacaaacaaactaacttatttaagtacaaaattctttacagaaaacaaagaagaatacagaataacagtcacggtatctttaaatgatgattgtcataacaatatgtgtgactggagcgtaacagccgatattagacggaaaaataaatgtggaacgtatggggagtatatgggaggctgctgtcacaatgaagtcgcaaaacattttccggaattggcaaaattcatatcgttgcatctttgtaaccattatggtgctcctatgtatccggtggaaaatggcacgtatcacataaagaatagcgataagtctgtggctattgaatatttacgtatatcagacaaggaatattccaaattatctgaagcagtggacgatgagatgtatttcaagtatctgcttttcgatttaggaattgtggatagatggaaacgtgaatcagacgagcttcttgttgaacttgaagatctgtgtggcaagaaatgggtaaatccgtatatgccagaaaaggaaagatttactttgatattaacggacgaggaacgctcgcttgttgaagagcgcattaaatctgggtattattccgcagaaaatatcgaaaaacgtaaaatagaagctcataaagcagatgtggcgggaaaacgattcaatatttgtgagtattataatcagaaaatcagggaagcggaaacgaataaaaagataatgctctgtgtatttgattatggattgccaattaataatgttatatattatcctcactcaaacactttatctttcaactggaacgattatggaggaaaaatcacacaggaagagtttgatgattttgtaaataacgtagaccgctctcagttgccggaagatattaggtttgagcttaaataaaatattggatatggaaagattgaattttgaaacattgcttcgtgttgtaagatgggattacaaccgttgttttaaggatgaatcactggacaaggatttgttcatggaaaaatacgggaaagttatgggggaacattattacaataagtttgtccatgagtttaacgggaatatcctgaagatggtcggttacttcagaggttccgaaaaagaggggcaagccttctgcgatatgataaccgaacgcattgaaaaatatgaacaaagagaaccatacaacccttagcaacaagcggtaataaaatcttacaaattaattggtttggctgatagaaaattgtttctgtcggctttctttttatcaggaggtgacatgaattatggataaatattcaccccctaagtcttcattaatactattcgattaaataactaaaaaacttacttatatgaacaactctatggtcgctcacttatgggcaaacgaaatgaaagaatttgcaaatggtagtaacttctattttgaagatgaaagtatttactcctatggaagtcattttgaggttggaagaatcgtgcggaacaagcgtggagaaaaggcatatttaattaatgacatatatcgttcctcttctacaagcaaacatcaatgttgtgttcgtgacgcaataccaactggctcaaaggtattcagtgttggatataatatgtcaaatactggtaatatggcatttgtcaccagtgggttggaatccattaaagatgctattgaaaaatacaagaaagccagaactgaattaccttatcagaatgtttggggagcttttaaaaatctgatgggttatattgagttcttcgatatggggactccccagcgtcttcttaaaaagagtgcaaacgaatggcttggagctaaccatgaattatcatggaaatcagataatattaaacgtgaatatgtccgtgagttgaaacgtgttttccagatcttgttgaatcatcaagtactggaagttcttggaaccgttaatgtggttgtggatgaagtttgtggtgaaggaacatgggctaaatatacgatcagatgtcaaagatgggcagaaggttatgaaaagagagaggttgtagcccttgaaagggcaaggaaagaggaagaggttcgtaacaaaacattggaagaacggatacaaatgtggaagtctggcgagatttcccagttgagttattattgttggtttgagaatgatcagccgaacgtatggttgcgtattaagaatggaaaaatcgaaaccagtaagggtatcaaagtagaactaactgaagctgaaagactttggagattgattaaggtcttccataatggcggtcagttccagcacgatttggcattggatgtaaccggtcatagatgggcattcaatcgatatgaaaacgatatgctgactgccggatgtcaccggattgcatataatgagatggaaagtattgcgaaacaactgggatgggcgtaagtgctcatccttataaaaagaaggataaaaaccaaataaatacaaataagattatgaaacagaatatgacaacaataccatttgacttggaattggcgaagaaaatcaacaatggtgaatataatggaacaatagtgacatccggcagaaattttagagtagagtttgtgtattataaagaagatggaatatatccaattctgggagtggttcatactgatcacggtataatatcggattggttctcttctaatggatgcggctctaaaaattacagacttgaacttggagttccagaatatacgacatttaaggatggagatatattaagtaatgaaggtggtgattgtatctttatcttaaatacacatggagaatatctaacatctttgtatgcctctttagatatagacggtaatcttgatatggaagatggtctatgtgcttgggggaatcacatagaaaaatacaaatttgccactgagtccgaaagacaaaagttggttgacgcattaaaggcaagcaaggagccaaaggctaaaatatatctaaaacgcttcttcgggattgaagaaaagccgaaatatgattttaagccgtttgacaaagtgttagcaaaatattatgaggacgacaattgggaggccagtttattcataagaacaattacagacgatcaggatggggagactaaatatgaatgcttgaatggaacagtgtatgtttattgcattccttttgagggcaacgaatatcttttaggaactgctgaaaatccataaaaatgaaaacggtaaaattatctgatttttctccttatgacagaaacaaaggaggaatacaagaattgcatcataaaattgagtccaaaacacttcagtattggggcgaagatagtggtattctaatcggcatcactccgatatataagagacgtttgtggagcgaagaagtaaatgttataaatgataaacaataaatatgaaaacaagaacatacgaaggggtgcagcatggggactgggtaagatgtgctttatgtggagtacaaatgcttcttccatgtggagctgacaaatgcccggaatgtagcagtaacagcactttaatgtgggtagatgaagataggcaagaaatggatgttgaacatctggattgtcttgcccaaatacgcaaattggagttacaagaatatttgtccccagatgttttggcaatagagcatagtgaatattacaaacaattgatagaagaggattaatgattatgaaaacagaactattcgatatatttaccccacaacaattacaagcgattaaagatgctataatttatggtgcatggggcgatacaagtcaggagttttacggaaaagatggtctgcttagtgaaactcattacgcatggggattttgcacgaatgatatttataaaggcggtcattttaaaaaccggagatctatctctggcataatgagtggaatttccaagaagataaaaacagagaaacttaattttatcagtcattgttcggattggtggggtgatggaaccggagatatgatgtttatcgctatggatgttgttaatgctaagatagaagagcttgaagagtgggcgagaattgactaaatgtaaattgtgaattttgaaactatgttttgaaatatagaatttgttttgtatttttgtgacgcgaaaaagagtgactgatgagaatatttacagagcagactttaaaagaatatgcagaagcacatcctgatacaaaagttgttttgcaggaatggattgctatagtcaagaaaagtgaatggacttgctttgctgatgtgagaaaaacattcaatagcgtagataatgttggaaatcagcattatgtattcaacattaagggaaacagccataggctgattgtggtaataaaattcacgataaagtttgtatatattcgttttattggtactcatgctgaatataataagataatagattgttctaaaatataaagctatgacaaagatagaaacaaaagatcaatatgattgggctgtaaaaagggtagaagaacttttgccgttagtgacagatgaaactccgctcaatgatcccaatagcatagagttggaattactatctaatctcgttgctgattattcagaagagcatttcgcattaggcgaacccacacttatagatgtacttaaacttcgcatgtttgaaatgggacttaatcagaagtcacttgcaaaattgattggtgttagcccttcccgtttgagtgattatgtctctggaaaatgcgagccaacattaaaagttgcccgtgaaataagtcgtaaactgaatattgatgcaagcatagtgctgggggtatgacaagtaatttttgaacattaatattggattagatgtttaaggactatggattatttagagtacaaaggttataaaggttcgattgaatatagcaaggaagatgattgtctgtttggcaaggtgcagggattgggcaaaaatgtcttgattctttatgaaggtaatactgtagacgagcttcgcaaggattttgaaggaggaatagatagctatcttgaaggatgcaaagaacgaggtgttactccccagaaaccttatagtgatacagatgagtcgtagttttaaagctctgaatgttgctggaaagatttctttgtggtgacaatatttataagcaatataattccttaactatacattattttcatttgaaagcgtgattacttaggtagtcacgctttttaattgacaggccataaaagagaaagccagcctattagaataagccggctaatcttccttatttctgttccttcagtctttgattaatgattcttacgattcttgtctggagtttcattaaatctttggtggattctttttcgagatcaatatccagagccttaatattgatagtcggtgatggattttctgtatcattggaattgttctggatagaattgataaccgctcccagttcatctaattgggatttaatcttctcaatcttttttgaatagttagttgtacgtgccatgttattgtgtatttaaatgatgtggcaaagatatgatatttcttagtgtaaatatagaatttaaacaataaattaaacgatatgccgtataaaagtgataagataaaaatagccggcacttcttatgaccgcagggttaaactgacggacaatgaacgtgaggaaataaaatatttatacaagacttccgttcatagccaaagaaagctggcaagtatgtttaatgttagccgaagtttgatagcaatggttcttaatccggaacgattacagagagcacgtgagctttttaaggaaaggagaaaggacggaaggtataatgtatccagaaaagaacgagccaggataatccgtgagcatcgtagatataaacgacaattatttgtcgaaggtaaaattcaaaacagcatgaaaaatgaacaagaagagacgagaggaaatttctgatattattgaacagcttgaaggtttaatgtctgaggtagaaagccttaaagatgaagaaagtggagcttatgaaaacttgcctgaaggcatacagttatcggaaatgggagaaaagatttctgaagcagccggtaatctggaggaagccgcaggttgttttgaagagttaatcggatatttagtagcagcgaaaggagaagagaaaaatgaagaagaaaaaactgacgaataaggatttggacaagtatgcggaaatttccaatattccggtagagcatcttgtttcccttaataatatggatgccctgaatgttgtcaatattcatgctattttaatcaagaatgaatacaaaaaacttcttgatgagaacaagtatacaggcaaacaaatcatggaagcattgggtgaacaatacggtatttcaagataccatgtggagacgataatttacgataaaatcaagcctacatcttgtgtttgttccaagtgcggatcggaaataagcaagtacaaattttccaagaacaagggtgtgtgcgataaatgtatagttgcggaaataaatggtacattgtaatataaatagattaattcgatgaaagaaaatgttgtttatgtggttttattaatagctaaaccgctattctttattctacttgtcatgatcggtttgatgaaggattgctgtgatgataccgacccacttgataggggagacagcatggcaaaatacggtatcggctttcattccagtgtcaacgattcgataggctgtggttttaggatagtgtatgcaaccaatcgtccggtcactcctgaacgtctggaggaaatcaagagtcgaaaacatattcaggagaatttcaataagatgtcggaagatgtattgaagcatttcaataacagcctgttgtatgttgatatttatgattttaccaatattgccaagagatatgttctggacgaagatctggtaatggatcaggtgtttattaatggcaaagagaaatacgatttatatgttggcgaaaataaatggttcggtgaaaaaagtgctaagtggatcagtatggggactttgcaggggattcaatggatcaatcgggatgatattagaagagaagataccggagataatcgtatatatcgttattggaaatgcacatattcattgacccgtcaatcaaaaacagatgaacggtttagtcatttctctgaggatgaacgtatatgggattaaatatttatatgatagtaaaataagtgaaaaaaaataacagaaataatttggagtgaaagaattttagttttacttttgcatcatgattttagcataaaatcaaatatacaagtttattaagtgattgttttattttagatttgatatatttatgatgatgataagcaagttgtatgacgcaagagacaaaactaaagttctacacttctcaggaaaccggcaagcttgttagtttcgtgagtgtaaccaaagctaatagattgaaaggtgtacgtgaagattcggattgcaagaaaaaaattgtagttctgtcttcggatttgacagattcgttgaagcccaatgtactttacaatgttattttgactgaaatgaaaaacaagaaaggttatgtagtaaaatcggcttctcctgttttattcgaggcagaaattgaccaatgtattataccaaaggcggtatacaaggtatcggttaagttcggtaacaaaacaatatttttcgatccgctggatggcaagagtgattcaagccggactttgcagggtgcattgaaagcactggaggtaagggaagatatagctaacaaagaactggttattacagattttaaagaaaaaggattggaaacgattcgtcaaatggaagctgatggatattatgtcaaagcttgattttgaggtttaaccaaaaccagtcccctataaactatttggaaatggattatcctaaagttggcatagccaccgatgccgctcattcgatgaaaaacggagtgacggaatatcaggctatagatttaagcacaggagagagattgttctatcagaatttaggcaaccagacaaccaatatcggagagttcttgggacttatggctgcaataaagtatgtgatagaaaacgatttccagcccagaattatttatactgatagcataaccgctatcacgtggttcaaaaacaagaagacagcatccaaaaagagatgcctcgaccttcaaaaagccgagatattcttgaaggtgatggactacgatgtttcaacgatagaggtcaggcattgggatactgatagatggggtgagaatccggctgattttgggaataaggggtaattaaccaaaaccacaataacatactcataaaatttcatattattctttttgagccagcgcggttcgtgagaatatagctggcttttaaatcatggggtggtagcagttggtagctcgtcaggctcataacctgaaggtcggcggttcgagtccgtcccccgtaacaaggtaataccttaactatgcgtttttcatttttagtttaacaacagtggatgctccaatcgtagaagggagtttaaaaatcactacgaatccggatactctgacatgcggtatcaacgaggacggagggcacagcagaaatgggaagcgtttcatttcgccaagtatgtcaaaagcgttcttagctcaaataggatagagcaggtctttcctaaagatcaggttatcggttcgattccggtaggacgcacatcaaaccacatagagtgttgataatagttgtatagttattaaaatgtgatgaagactctccggtcggttcgtgaggatagaccggagaaaattggagaatggtgtaatggcagcacaacaagttttggtcttgtttgtccgggttcgagtcccggttcttcatcaacataactaaaaccagaagttttgaatatgaatacagttacaaaaggcgaagtgatggcaaacatgaaagaagtggtttgccgtactgaagaagtgttgggcaagccggtaactcatgtttcggtcagaatgaaaaacggatttactctgcatgagactacaacctgtgtcgatccggagaattacgatgagagaatcggcagacgtatctgccttcagcgtattgaggaaaagatttggttcttgctgggatacgctcttcaagacagattagcttctgaatcaaaaagcgaaccttcggataagaaacaagacgatgccaaatcgaatatggtttcgatttcaaaacaggaatatgagactttgttgaagagaagtgagtttctgaagaagatagaagaggaagcagagaagagttttctggaacatattattcatccttatggatttataagcgatgtgttgcgtgccggtaatggcaaaatcgctgttgttgatctttcaaaccttctaaaataaaagtcagccctattgaagttttcaaaggcttctttagggcttttgtgtatataagttttatttaatctattaacaatcaaaattattaacaatgagaaaaacaattctaaagactttgtttgtgtgtttaatgtgtagtgtatctttaatggccaatgcccaattgagatataacgatcagggtctgacattagggcaagacaaatatactcctttatattttggcgatgaatggagtattgaaaattatgaaggaggtttaaatgtgtatagagcatggccttttgatggttggggaaactataaacttttcattgattctaaaaccaatgtcggcataggtaagaaaccttcctataaattggatgtagctggagatgtttgtacttctgggacatatagaacaacctctgattctcgcttgaaaaataatattatgcgattagatagcaaaacttgtttagataaaatattatctcttcagggaaagtcctataataagaaaagcatagctattgtagataaagaaaaggaattacaaaatttgcttgcgtctggtaaaattaaagaagaggatataagcaaagctcttgaattgatgaacaagcaagatacaatatccgatcaaaaacaatatggttttattgcccaagaattaataaaagaatttccggatctggtatctgaggacagcaatggttatcttgctattgattatttgggtttgattcctgtattggtagaagcccttaaagagcagcaaaatattattcaagaacagaacaaacaatatttacaattaatacagaagtgatatggtgatgaaaattaagttattaatgataatgcttgtgtgttgtgtttttgcaaatgcgcaggttctacatgatgctaatggcaattttaattatattcaaaattatacttttaaagctggaagcaaatatgaaattaaatttgagaattatcgtggacgaaaacttaaaattggaaatagtgtaagttcgttatctcccagtggagatgttgttgtagatggtgatctcaatataaatttgggtacatcatgggggaatggcatagaaattgattctggttttaaggttaatactactgctaatcttaaattgtggcaggaatcttttcctgtaggaacggaaacaagatctataattacagattcagttttaaattatttcccatatagaacgattggtgtaaaaatttattcggctttacattttatgtcatttgacactaataatcattatgatattattggatttgattattatgaaacaccagtagattatttaggctgtttaagatttaacttttataataatagatacaatagaaaaaacgttatgtattttaacgatccctactgcaatctcgttattagtaacagttatatacctcttgatggaacaaccagattatatgtggacggtgatatatgtgcttctcgatttattacttcttcagataaaagattaaagagcaatgttgagaagattactgattttgagtttatctatcatttgtttgaccccaagaatgccaaagtcgtccaaggatcaaagaaatcaaaaagtccttctgatggtctggagctaattccatttatagtagaagcaattaaaaatcaacagaagcaaattgaggaaaaccaaagaattatagatttgttgaaataatttttatccaatagtaaaagcccgtttcttaacaaggagcgggctttttgtataataagttttatcaataggcgtttaataggaaaattggtatcgtatgttatttaaagttgtaattaagtttttattggctttgagttttgttttaggcagtcataagttatgggctgtcaattcaaagtatgcttcaaattcagttcttgctaccggtacttggaaaaaggtaagaatagagaaaaatggtgtttacaagataacatacgcagaattattgaagatgggttttaatgatcctatgaaagtatctgtgcttggatatggtggttggtcattggatgaagattttactaaaccctatattgatgatcttccagtgataccggtttggcatggggacgggtatttgttgttttatgggaaaggttgccgtaaatgggaatatagtgcttttgagaaacgttttgtacataccaataatccttattcagaatatgggtgttattttcttacagatgatattcccgtaaagaaaatggagcgtatgtcttctataaaaggggaagccaaacttcaaattacagaatttgacgaatatctgttacatgaaacggagcgcgtatctcctaataaatcaggaagaaaattatatggagaaaatctttccggtttatctacagatatattgataaagggggtagagggaatgaccgataataaaggggaagtgtggtttcattatattgaaagaacaacaaccgagaaggaaatttctttgtttgttgatgggaataaagcaggaagaggatatactccaattattacatccggagataagcatgttgattatttgaaaggcaagacaggggttatttcaggctcatgggaaggcaaaaagaacaaggatattaaaattcagattcaaagcaagccttctttaagcaattctgcatatttggattatgtctatttgcaaggcaaacgtgttttgcagacatataatgaaccatatattttctttcgaagtttaccttcaataaataacacaacagaatttattgttcagaacgcaaataagaacacattggtctttgatgtgactgatggctttaatgtcaagttgatggaaacaagcttaaagggaaacaatttgtcattttctattccggcaggtgctttgcgtgaatttgtgttggtgcaaccagacaagaggttttctgatgtagctgtagaaaatttgccgaatcaaaatctacatggattattgcaatctgatatgataataatatctccttctgattttaagaaagatgctgataggcttgctaatattcatcgtgagaaagataacctgtcagtgatagttgttactccggaagagatatataatgagttttccagcggaactccggatgcaacggcttataggcgttttgtcaagatgttttatgatagaagtaaggacagaacgggtagggctcctaagtatttgcttctttttggagatgggtcgtatgacaatcgtttcttgactaaggaatggaagacattctcggaagcaaatagaaagaatatgctgttgacatatcagacggaagaatcgttaaatgcgtattcttatgtgacagacgactattttggattgttggatgatgatgatgaaatttttaggtatgaaaaagcaggcagtggaatgatacctaaatcaagaggtttagttgatattggaataggtcgattacccgtaagaacgtcagaagatgctaaagctgtggtggacaaaatcatatcttatatgacagattgtaaattaggaatttggaaaaattctctgtgttttctggcagacgatggtaatggtagtgatggtttttccactgtacatgtttctgatgccgataatgttgcgtcctctatttataaaaacaggccagaatatattgtgaataaaatatattttgattcttataagaaatatactgttggaataccctatccggatgtcaacaaaacgcttcagagaaagttgaatgaagggcttttggtgctggattatgtaggacatggaggaacagaagcattgagtgatgaaaaggttattacccataatgatatattaggatataaatatgaacatttgcctttgtggataacaacaacttgtgatttttgtcgttttgacgatatacaaacgtcagccggagaagatgtgtttttaaataagaagagtggtggaatagtattgtttacaacatcacgtgtgtcttttacagatattaatcgcatcgtcaataatgatttgattagtggtctttttgtaaatgaaggttataaaaacaatagtttgggggatattattaaatccatgaaacgtaacacgactgatggccggaagctgggattttgtcttattggagatccggctctcagactatcatatccacaatataacgttagtattacaagtattaatgaaaaaccggttggggattccgttgttcagtttaaggcttttgaaaaagttacaatatctggatatattcaagatgctttaggaaatacccaagatgatttctcaggacaattggatgtccaaattttcgatggtaaaaccgatgtaacaacgcaagggaataatggtaacaagtattattacgaagattatgtcaatgtcatatacaaaggtggaaccaccgtttcaaatggtcgttttaaattgtcgtttgttgtaccaaaggatatttcatacaccacgaccaataaaggaaaaatgagtttgtatgcgtttaacgaagcaacaaggatagatgcacaaggatattacgataattttgtggttggcggcacttccgatactcctgaaatagataatgaagctccagaaataagagctatgtttttgaatgattcagcttttgtcaatggtgggaaagttaatagcacaccctacttttatgcccgattgtgggataagtctggaattaatgttacaggtagttctgtcggacatgatgtgacgctttatatagatgataatcctattcgtaattataatttaaacgattattacaagaacattccagacaaacagggagagggcgaggtcggattttctgtacccaaattggaatcaggattgcattatgcggaatttaaagtttgggatgttatgaataatgttcgtactgatacgattacatttgaagtagtagaaggcttgaaaccttttatttgtgatttaaaagtatttcctaatcctgcaagagaatctgctcagttctatttttctcataacagaccggagagtagaatggatgtagaaattgctgtttatgatatggctggacgtttgcaatggaaacataaggaacgaggttcttcagatttctttaatggttatactgtaaactgggatttgagaggatttggtgggagtaagttgagacccggagtatatctatatagagcatcaataagtacggacaattcaaaagatgcaactgaggccgaaaagatgattgtactgtattgatttagttaaattttagcgattatctaagatgtacaattaaccacccatattctctcgaatagaggtggttgataaataactatgaaaatgtattaagcgataaaaataagtaatatctaaatctcaaatatacaaagtcgctatatctgtcacagatgaacgactttataaacattatcaaatttaatgtttgctgcaaacaatgtttatgggctaatatctgatcgttatgtattgtttgcagactttcttattacaataaaaattattgtatttttaaaaaaaacaagttttggttgtgttttgtataataatatcttaggataacatttaatgcaatgaccatcttcactttcgcaagcaaagatggtcaagtcgttttgtaattaatgaatataggcaaataaatcgatattgcattaatacattaacgttgttcgtttatgaacacaaatgtatatgtttaatttgacaatagcaaatatttattgatttaaaaataaaagccattccaactatcacaggcagaatggctttgtataagtagaccataaattaaagattgctattggataaaatatagaaatgatatagcaatcttgttgaattaaacttatcctttacaaagataagctattttttttgattatagactgaagtttgtgtcattccataaaaagaagagctgcccaatcttcacaggctaacagctctaagaataaattattttatacaatatgataaacaaaagttattgaaaactttgtttatgtgtaaagggttactcatgtattaaatgatctttggttgctacaaacataactcttttgtttgatttttcaaacataaactattacaagtttcacgaaaatctctttaaaccccgtatgttgaagaagaatttatctattggtaacaaatgttaattttgaatattgaggctgctgaaaaataagaatcgaccttttgtctgatataaatacatgcaatttggtttgttttttgaataagattgctatatttgtgtgtgaaaattgtatgtatttcattgatatacagctttgtgtgatattccatgtaggcttttgtgtaggtaagttttgaacctacatgttcgttttaaaaggaaattttataaattacacatatacagatatatacgtgtttgcaaaatatttttacctttgttgagataaaaaattatgattaacacgtccatgtacccttatatgtaggttattagggttttaaaattttgattgatctgggaatcagtgtgttggtggagaaagtttcatttccgtgaggatagcctttttttgttttgctattttgggtatataatatttttttagcgtaggttctttgttaagagataggaactttatatagatgttttaaaatggtcgaatgaaatattcggataatcaaatgttattggaatatgtaaaagggagggttattttttgtttctatatttttgaagataagtgggttgtttaaaattgaataatgttgcattcttgaatgaatgtattacttttgtgccgtaaatttaaaaaagacaaaagtatgaagaaaggtagattttcattgttaggcattgttgctttgtttttaggtctgatattggttagttgtagtgacgatgatgatcagggaggagtaattgatacaggtatacacaaaattgtagtggaacaatctggtgatatagacgcgtttgaattaggacttgtttttggggcggttaatacgactagtgggcctacgaaattgtatgatgaggacggtaagtatttaggagaatcgcactcagtaacaagaatggaagatgctaaggtatcctgtcagacaggggatgatgctttctttatgacttgtgcaggttctgtaacaagtacttcagatgtatcaggtaaaaaactgaaggtgctggttactgcttatatagatggaaaagaagtaaaccaattggtgaaagaatatgaaactaaaggtgagatattgatagaaaattttagtgtatcgacaactgcaaagtaaataaggagtattattgatactgttttaataagaaatcaaaaaaggctgtctaaattaggatagccttttttgtttgtatttgaatattaaagattaatgcaaaaaatgatattgctgctgttggatatttatttttattgatggttaagacttgccgtgattagtaagaaaagattgtttattgttttttttatgcttatgtttgcaactttaatagtatttatcaattcaataattttgcgaaatatgagacagcttaaaatcatactattattagtagccttttcttgttccgtatttgcacaggataggttatctctgtttataagcagggcaaataaatatgcctcagtggagctatcagattatcgaaagcgtttatgtgtagaatataatatgtccaataattcattggatgattattacaggcggtgcggaagaaattgggggaatgtcggtttggctcttgaaatagccagaacttccggtaggcatatgcgggatgtttgtgattattataaacgttatcatcgacatggttgggatcgcgtattgatagagataggtataagaccgggatcaacatgttacaagcctttttatgacaggattcattatcatagtaactgttggcatgaacattattgctcgtattgtgatcatcacgataaacaccattataagcatcataaaaaacataaacaccacaaacatcataaacatcataaatggcacgatggctatgacgatgatgattgggatgacgatgatgattaacatttatagatataaaagtatattgaaatgagaaagattttaatttttttaggactattgtttgttatgttgagtaacatttatgctcaaaaaggcagacaagcgattggattcggattgagttatgggacagaaattgaaagtattggtttagggttgaaataccaatataacataactaaccccatacgtctcgaaccgtctttgaattattttatagaaaatgacaatgttagtatgttggacgtgaatatgaatcttcattacttatgtcctgtggggaggagtgtcaaattatatcctttatttggttttacattttccaattggatgtttgatttgggcgatggatttgatatagatgtggatggagatcatattcatattgacaaggacgatgaccatcataatgaatgtagagtaggagtgaatattggtggtggagccgattttgtgttgacaaataattggattatgaatttcgaattgcgatatcagttagttagtgattttgatcaagctgtttttaatttgggatttgcttatcgattttaatttactccttaattaaggaactataaaaggaaatttgtcagaattcacaggatgcgattccggatcaagcccaaatcgcatccaatattctttctttcacctgcgagatgaaatctatttatgaataaaaaccgtatctttgcgcagaattatatgtcgatatccaaaaataagatatgaagagagttttctgccccaagtgtgataatcagttagcgtttgacgaaacgaaatatccggaaggtaaagtgttggcgttcgtatgcccgcaatgtggttctcagtttaagatcaagttaggacgaaaaatagtccgtaccgaatcgggacaggaaaaagaggtgaaggaacctgacttctcctgcggctatattacggtaatcgaaaatgtctttggattcaaacaggaacttccacttgtaatgggtgataacgtgatcggccgccgcaataaagatactgacggagtcgatgtccccatcatcacaagcgatcctagcatggggcgtaaacattgtgtgatcaatgtgaaagaagataaggaaggaaagctcatttatacattgcgcgatttcccgagtcttaccggaacatttctgtgcagcgtacttgtcggaaagaaagaacaggtgcgggttggagaaggcgccattgtaacgatcggtgctaccacctttattcttcatgtaccgggaggggaggaagagtagccttttctatttgaacttagatactgtccggagtgaaactgacctctacatcaaggcgataagggagatagggaaattggcgtaggtttcgggagagatggatgcaaaaatccttttcgactccgggggcagtaaactaagctaaagaatcattattcatgcttttgtattcgacttcgaatataaaacaactcatatcgggtttggctcacgcccttttacataaagaactacaaatatactaaacgaaagtttcataaattatggtcaaatagaccttaaaaggctatcagttagtctgtaatcttggcgttgtattaaaatgtaagtgttaaatcggatatttcgaacaatctttctgacagatctcttttttatatgtacttttgtaatcgaaagaggcaatgaggttaattaatggaacagaacaaggtacaggccactacggggatcactttccgtatactggtcgctttgagcatatgtcactgcttgaatgacacattacagtccgttatctcggctgtttatccactatttaaggaagatttagggttgagctttgcccagatcgggttgataacgcttgtctaccagtcggctgcatccgtatgtcagccgttgactggacttttttttgacaaatggccctcggcatggtcgttgccgacagggatgagttttacgcttgtggggttgttgagcttggcttttgccaatacgctgccattagtcctttgttcggtggcattggtagggatcggctcgtcggtcttccatccggaggcctcccggttgacttcactcgcatcgggtggaaagcgaggattggcgcaatcgttgttccaggtcggaggaaacttgggaggatcgttgggaccgttgcttgcagccgtttttgtcgccccctacgggcggaggcatatcgccttgtttacgatcctggcttttactgcgattatggtgatgatccctgttgggcattggtataaaagtttcctgctccggttgaggaaagcggaaggagaaacgcttaagacgagtgtctgcagaccactcccgatgggaaagaccgtattctcgatagcgatcctgttgatcctaatcttctccaaatatatttatatggcgagtttgaatagctattacaccttttacctgattcataagttcggggtcagtgtgcaagcttctcaactttatctctttgttttcctgattgcgacggcaatcggaacgctgttaggcggaccgatcggtgaccgggtaggacggaagtacgtgatctgggcttctatcttaggtgcagccccgtttacactaatcatgcctcacgtggaaaacctatatctgacgacgattctcagcttctgtgtcggcttgaccttgtcgtcggctttcccggctattctagtgtatgcacaggaattattaccgtataaattaggtctgatctccggtctttttttcggttttgcctttggggcagcggggattgcatcggctgtgttggggaatatggctgatcggtatggcatagaggcggtttataacgtatgtggctatatgccccttattggattggtcacgtggttcttgcctgaccttaagaagaaacggtagtagctggggaacaataaaggcgatcgccttgttataagtcataaaattcgcacaaactaaatttagacacatttatgatttgtaactttactcacttcagcatcgccctgctgtggtttcttcctgtcttttcctctgcccagacagagcctatggatttgtcgctggagcaatctcttacgctcttgcgaagcgagaacaaaagcctcaggattgccgggaaggaagtggagctggcgaagaatgaacaccagaagctcaatgctttttggtatcccactatcagtgctgcgggagcttatgtgcatatgtcgaacccgatcgaggtacgccaatccctgaaccagttcaccgatccggcgaaagaatatgtccattccatcctgcccaacgaccagtttatctcatcacttctcgataagattggacaaaacacattgacgttgccgctcatctcgcaaaatatcacgtcgatcgatgcaaacttgacctggcccatttttactggcggcaagcgcatctatgctggcaagatcggcaagaaacttgtctccgttgccgaagtcaaccgcgaacaggtaagcgcgaaccaacagactttgctgatcgaaagttattttggcttacgtctcggccagcgggttgtcgaggtcaagacggaaacttacaactccctgaaaatccattatgaccaggctttgaagttagagcaacaagggatgatcaaccgggctgagcgtcttgtagcccaggtaagcatggaagaggcgaagcgcgaactcgaatccgcccggaaagacctcgaagtcgccagtcaggcactcaagagcctgatcaacataggagaagaacaggtgatccgcacgacgacttccctttttatcaacgagagtatcccctcggccaactatttcaaggagatgatcccttttaataattacttggtcaaccaactgaagctacaggaaaatatcgccggcgaccagttgaagatcggtcgttcaggttatctccccaatatcgccctgatcggcaagcagactctctatgcggatggagtcgacaaatatctcatgccgcgcacgatgatcggggttggctttacctggaacattttcgacggactcgaccgggaaaaacgtatccggcaggcgcgtctgaccagtcagtcgctagccatcgggaaagagaaagccgtgaccgatttgcaggtaggagtcgataagttctactcccagatgcagaatgcgatggacaatgtcaaagcgttaaatactacgcttgagatgagcaacgaactggttcgtatccgcgagaaatccttcaaggaaggaatggcgacctcgtcggatgtggtagacgctgaggtggtgctctcgaaggtgaagaccgccttcttgctcgcctactaccaatacgatgtggcgcttgccaatctcctgtccatttgtggtattcccgaagctttccaccaataccggatggacggtaaaacagagatcttataaacataaaaccgtataatcatggacaaatcgaagaaatatctggcgatctcctttatagtagtgctgatcgccgtaattatcctgtctttcgtgggtatgttcttgttgaaggataaacctgtgatcttgcagggacaaatcgaagcaaccgagatacgtatctccggaaaactgcctggccgtatcgatacattcctagtaaaggaaggacagaatgtaaaggccggagacacccttgttgtcatcaacagccctgaagcgcttgccaaataccagcaagtgaacgctctcgaaagtatcgcccgtttccaaaaccagaaggtagacgggggaacgcgcaagcagatcattgccactgtccagcagctctggaacaaatcgaagtcggatctcgaactggcaaagaccacctacaaccgtattgaagtcctgtatagggacagcgttgtttcttcgcaacggcgagacgaagtgaaagctttatatgatgctgccgtagccggtgaacgggcggcctggaaccaataccagatggcgcttgacggcgcccaaatacaggatagagagagtgcccgctctttggtgaacgcagctaaaggcacggtcgaagaggttgcagccctcttgcaggacgcccgcttgacagccccggaatccggccagatatcgacaatcttcccgaaaaggggagagctggtaggagcagggatgcctatcatgaacttgatcgtgcttgacgacgtgcatatcgtactgaatgtccgtgaagaccgcctgccgttctttccgatgggagggacgtttgttgccgatatcccggctattgacaagaagaacatcgaattcaagatcaattatgtcagccccttaggtagttttgctacttggaaatcgactaagcagacgggcagctacgatcttcgtacgttcgaggtacatgctctgcctgtaagaaaggtggaagggctgcgccccggaatgtcggtattggttgaattgacaatggataattgataatgaacaattttaagaatagtgtgatgaattgtcaatttgttcgggtttttcgaagagaacttgtacggatggtctcgagacgtctctatttcggggtgtgcgtcgtgctgccgctgttctgtatcttcttcatgtccacgatcttcggaaacggacagatggagaacatacccgtcggtgtcgtcgatgaagacaatacctccatgtcgagggaagtcgtgcggactgtcgaagccgttcccactttcaaggttacacaccgctatgtcgacgagacggcagcccgtcgtgctacccaatcgaaagagatatacggctacctcgtgatccccaccggcttcacggctgatgctatagccggacggcaggcgacgcttgcctactactaccactatgctcttctgagcgtaggcggtgaggtgcgcggcgctttcgaagccgtccttcgtcaactttcgatggctccggtcgtaatgcaagccaccgccttgggtatcggggaggagcgggttgccacctttctgctccccgtcaaggcgagtagtcatcctctgttcaatcccgatctggactattcggtctacttgagcaatcctttcttctttatccttttccaggtcattatcctgctgacaacggtctatgttattggtggtgaggtcaagttcgggacaggggcggagtggctctcaacagcaggcggcaatatcatgacggcggtagtgggaaagctgttgccctataccgttatctttagcctgatgagcatattggcgaactacgtcatgttcggccttatgcacataccgttctcatgcggtttctggccgctcaacctaacggcgatcttgtttgtcgtctcgacacaagcgttggcggtcttcatcttttccgtttttcccgtgcttagtatcattatcagtatcgtgtcgatggtcggttcgctcggtgcaacgctgtcaggggtgacttttcccgtgccctcgatgtacgctccggtgcattatgcctcctacttgttccctgttcgccacttcactgagatatatcagaacttgctttatggggattacggctttgcttggacttggatgaattacgttgcgctgctctgcttccttcttcctgcgctgctgatgttgcctcgtctgaagaaagtgattgtgaacgaagagatgtggaggcatctcgtctcttaaaaaagaaatatgaatatgaaggtaatatctgttatacacgatgagttcaagacgattgccggcagctatgccatcctgcttgtactgatgggcggcatctttgtttacggcttgctctacaattatatgtacgctcccgacttggtctgtaaagttccggttgccgttgtcgatcattctcatagtgaactgagccgccactatgtccgcctgcttgacgctaccccgcaggtcaatgtcgtgactacggctaccggttatccggaagcccaggatatgatgaagtcgggcagggtggctggtattctctatctgccggatgacttcgaagatcgtgttgcccgtggtgaagagtctgttttcatcatgtacgagacgacaagtgctttcctttactaccttgccatgcaggaagcttcggccgcctccatgttggcgctgaacgatgactaccggccggagatgttggtattcctgcctaaggaggctaccacgaagctagcctctgcccaggcagtcgaggtggtcgggactgccctctacaacccgactgagggttatggaacttacctgattccttcggttctggtcgtgatcatcttccagacgttgatgatggtgatcgctatgattagtggcgacgaacggcatagcggcttgattgtccgttttgccggcaatcctgtgaacctctctttggaacggatggcgcaggttgtgattggcaagacatttgtctatggtatgttgtatgcggttttcgctttgttcctattagggttgatccccttgatgtttggcctcccaaatatcggcaacccgctgtatgtcattatgctgatgattcctttcttgttggcgactagttttttcgggcttacggcgtccctgttctttacggactccgatgcgccgcttctgatgatcgccttcttctctgtcggcctcatctttctttccggtgtctcatacccgatggaactgatgccttggtattggaaattggtgcattatctcatcccggcagccccggcgacaatggcctatgtcaagctgaactcgatgggggcttcgatgagcgagatacaacccgaatatattaccttgtgggtacagtgcatattttattttgtgacggcatgtttggtttataggtataatatccggaaagcggtggcaaaaggtacttctctggtaataaccgatgacttttcatcccataagtcatagcttttgcaggtgtaactgatagcttttgttgtccccttttgcttgtaccttttgtttcataaaggtttaagagatgaggataagctcatgtcctccttcactcttacggattaccttcaccttccataagccttgttaaacaaagcatatgattagaaggtgaatggtaaaccataaagttgtcgaaaacatttattcaaaagtagtcgtgagtcgttttattaggtttcctgtcccttggaagatagcctaaaggtgaaaaaatatagcctatgacctatacgaggacaggctatagggagatgataaaaagggtataggcttttcggaaatagcctatacccttttgagaatgctgccgacagtttgttttatgaaaaacaaaatataacacccgtaaagcatagtgttatctttatgagttagggtagttaatgcatagcgttatgatctgccaagtctctcttggtgtaaagttattcttcaatttccatctcatccaacaaatatcccgctccggcatatttgtccatgatgaagagaacgtagcggatgtcgacaatgatactgcgttggtaatcggggagatattggatgtcgccgccgactccttcccaattgcggtcgaaattgataccgatcagttcaccgtctgcattcatcacagggctaccggagttcccaccggtcgaatgggtggttgtactgaaggcaactggcatttttccgtcggaagttttgtagcgtccgaaatctttggcagcatacagttctttcaagcgggttggtactacgaattcccagttggtggaatcttctttttccatcactccgtccagtgttgtctgatggccatagtagtcgcagtcgcgcgggctgtacccttttacctgtccgtaggtgaggcgcagggtaaagttggcgtcgggaaaattggcacgatcgccgtacatggccagcaaaccttttacataactacggtgagccattgcatacccatcttcaaattcttttaacgcattcttcagattggcttcttctgcacggacagacttggcaaaaagaatcatcgggtcgttttccagtgctttgacagacggacgagagaggaatttattgaaattatcctcactgccgaagatggatttctcgaacagatagtcgacgaatcggtctgtgtctcctttgaacttcttgtcgattaattcgaaataggtcggttgtgctttcggatcgacttggctgcggtactctttcagcatcactttggcgattttcttatcgacgtcggccgagtaattgctgttggcaaatccatgataagcccgttccaacagccggagttgttcctgtctggcttttttgtctttccctttcaaggcttctatgaccatatccatttgggttggcacacttgtaaattcaattcctcgcaggatcgcttcatccaacatccaactgcggaaacgtaggtctttacggtccgatacgatctgttcgatcgccatcagggcatcggggtagctcggttcgcacattttgttggaccaggcaatcagtttgtcctgttcctcctttttcatttgttcgaaattacgtttttttatggcccagttgctaccgatcgcatttttgtaagcattcgttgagcctgcatatttgctggcatactgaatccggacagctggatctttcaacatctcgtccaacataactttctggcgcaagtcacggatgtggatacggatcgtgttgtcaatatcacggcgttccgccacttcccaggaagtataatatttattggtacggccgggaaatcccatcatcatggcatagtcattttcctggacgcctttcaatgagatcttgaaccagcgtttcggacgaagcgggacattcttgtcagagtaaggagccggattgccgttcgcatcggcatagacacggaaaacggagaagtcgcctgtatggcgcggccacatccaattgtcggtatctgcgccgaactttccgatcgatgagggaggagctcctaccaggcggatatcggaatagattttctttgtgaacatgaaatactggttaccgccatagaacgcctttatctcaacttctgtgcctggattgtcctgcaggaacttttctccgacttttgcttttgccagtccgttcagaaatttcggagataggaagttcatgctgttaggatcggtatcttttttcagttcctttttcacatagtcggtcacgtcttctattttatcgatgaaagtgacggtcatgccggggttcggaagttcctgatcgcgcgacatggcccagaagccgtctgtcaggtagtcatgttccagcgtgctgtggcgctggatgcaaccgtagccgcaatgatggttggtcaggagcaatccttccggcgaaacgatctcgcccgtacaaccgcctccgaaaatgacgacggcatctttcaaggaagctgagtcggggctatagatatcataatcctgcaatttaagtcccaaagcttgcatttctgggaatctttgtcctttcagtagaggcagcagccacataccttcatcggctgctaccggtagcgacaggatggctgccgcgagggagatgatgagtttgttcattgatttatgatttgtgatttataaattatgatttcaggtttatgactttatcgtcttcataaatctgaaatcataaatcttaccattgtttgtacggatattttgtcagcatcgagttgtagtaacgacgatctccgctgacctcgtgtccgacccagtccggccgttcaaaaggttcgtcttcagaagccaattcgatttccgctaagatcagtccttcgttgtcgccgtggaagacgtcgacttcccaggtgtgtttcccgacagggaccagattgcgtactttgtcgataataccgggttcgcagagtttcaacagttcttccgcatccgcgggtggtatcttctgctcgaactcgtagcggctcaacccattctcgtccgatgcacctttgatcgtgaggaatccttcttccccccggatgcgtatccgtaccgtccgtccgggttgtgagcagatatatccctgcatgatacgttcggatttggaaacctgtttgctgaaatccccttttaccagaaatttcctttcaatttcaatcgccatgatcatttgattgttaccatcgttgccccgaagccgtattcacggaaagaggcatcctggtaataatattgtttgtattttgttttcagttctttctcgattgctttgcgcagtaccccgtcacctttaccgtggatgaagacgattttctgtcctttgttggcggcatatttggcgagcacttcatggaatttctccaactggtaatccagcatatccgcattactcagcccgttggtgttgtccagcagttcggtgatatgcaggtccacttccagaattgagctgtcggttactttcttcttgacgatcgtttgggggacacggcggtcttcgtgcaccttctgctgcatggcttgctggagttcggcagcagagatcagtaattctttttcggggatgtcctggcgtacgattgggtataccattgcatcttcatcgaaaaaatcattttccatgaagcagtgttgtttgtaaaatttgaccgtatcgagatggagttctaccgaaatggcattcttcaatgaataaggtttgtcttttttgaaagcgatcagttgtacgcaaatacgttccaagtcgttcaactcttctttaccgaattcttccaggaagatctgtgtattcggctccacaatgccgttatagcggctgatccagctattgttctggcgattcatatagttgaaaaacagatagtaattgctgtcattgataaaataggtttcatagccgcttccctgtatcactttggcaggctctatcgggaggtaagccaaatagatgttcagccgttcgccttctatggtttccgttaccttttctacttcgggttgaggttccggtttcttaggttgcgggacagcagcctgtgtcacggaaggcagcggtgagcgtcgggagctgtgtacctgcatctcgctgtctcctacgactacacattcgcggatcaatgccggtacttcgaatccgtcttcatcttccaccaaaacttgatctttccctttgaaactacgaacgacacctccaccggtgctgttcaggaagcgcactttgtctcctacttttatgttactcatcattctatttacttttgttatttgctacaaaagtagtaaatcctgaagagtaatacctgttcttgttgatattttctggtgaatgcacttgccgactaaaagtttcatcttatgaaacggtttggaacttcaagagccacttataaagcagaaagggtttttgactattcgtatttattttttgagttctttcgggatattgatctccatgcaatatgaaaacggatagttttttccctgctttctcttctcggttattccgtaaatggtttggcatactggatcatgccttgtacgtctttaaggcttttcggacgcaattcgattgccatgcaatattcgtggggaacatcgaaaggaaattcgatgccggagtctatggcttgtttatagccgaatctcggatagtagtccttatgtcctagtaagacgacagaaccgtatcccagttcggtggctcgtttgtgtgcttcacggatcaaggctgatccgatcccccgattttgatattcagggagaactgaaacgggagctaaccctaaagaggtgacggatttgttttctgaaacgatttcgacttttgtcatcaggatatggccgataatttcttcgtcaacctcggcaaccaatgaaagctctgggataaaagcgtctgtttgacgtagttgatctactaaaaaaggttcgttatggtcgctgtcttccatatctctgaaagcgagttctactactttatgaattgcttcatagtcttttatctgttcttgtctgatattgaaatccatcggtttatatctttaggtttataattttctgctaagataagaagaatacgacaaaatgtcaataaatttgtacttttgcaatccggttcgattaaaagagcctgtaatagtaaaagtcatgacaacaaagacgcaacagatacgcatcgaagattttgattatccgctgcctgacgagcggatcgccaagttcccattacccaaacgggatgaatcgaagctcttattatataaagaaggaaaagtcagcgtgagtatattcaagcatattacggattatttgccggagggttctctgatggtattcaataatacacgggtgatccaggcacgtcttctgtttcagaaagagacaggggcgaagatcgagattttctgtctggagccggtcgagccgcatgattatgctttggtttttcaacagactgaatgttgccgctggacttgtttggtcggcaatctgaagaaatggaaagaaggacttttgaagaaggaggtgcagctcgacggtgagactgttatactgaaagcggaaaaattgcagacctgcggggacagctacctcatcgagtttacgtgggatcatccgacttgtacgtttgctgatctgttagatgcagcgggcgtattgccgattcctccttatttgaatcgcgaaactgagaaaagcgatttgcagacctaccagacggtttactccaagataaaaggttcggtggccgccccgacagcgggtttgcattttacaccggaagttctggctgctatcgatgctcagggaatcggacgggaagaactgacgctccatgtcggagccgggacgttcaaacccgtgaaaagcgagacgatcgaagggcatgagatgcataccgaatttatttcggtgcgccggagttcgatcgaacggatcaagaataacctcggtaagattattgcggtcggcacgacttcggtccgtacgcttgaaagcctctattatatgggtgtcacgttggcttcgaatccggatgccacagccgatgaactgatcgtcaaacaatggatgccttacgaagagacgaataacaggttaacagctgatgaagctttgcaaaatattttggattatctggaccgacaccaggcggacaagttggtgacggctacccggatcattatcgctccaggctatgagttcaagatcgtacgtggtattgtgaccaatttccatcagccgaaaagcacgttgttgttgctgatatccgcttttgtgaaaggggattggaaaaatatttatgattatgccttaaggcatgatttccgttttttgagttacggggacagctcgctgttgttgtaatgatcatacaataaatagtacataatcctgtttatataaaacatagattatagcaaatgagacaatttaccccatatttgttcctgttgttggctgcgtcttttctgtattcctgtaaatcagcgaagttgagcgatgcggaagagaagcagcgtatcggcgaatattttgaagcggcggccatttaccggaaagtatatacgaagactcctcctgccaagcgagacttgcgtggatatatcgctttcaggatggcagagtgtaaccgtctgatcaacaatacaccgcgtgcgaccagtgcttatatgaacgcgctcaggtataagtatccggacagtatcgtgaatcttcgcttgggacagatgtaccagaagagcggacgttatggggaagcagtcaaatattacaacgactacctgctggcggaaccgggcagcgtattggcctttaacggcgtgaccggttgcgaggaggccgtgaaatggaaacagtcgccgacccgctatacggtgaagcggatggacaagtttaactcccgccgttccgaattcagtccgatgttgtacggtgaaaagtacgatcaactgtattttgcttctacccgtaccccgaaaggagccgggaaagataaggaagaaacgaatagtgccatcaccggacagcgtaacaacgatttatttctggtaaagcaggacgagaatggagcttggttggctccggtcgaactcgaagacgaggtgaataccgagtttgacgagggaacgccttctttttccaaagacgggaatacgatgtattacacctattgcgcacaggatccggaagggccgcgtacttctgaaatctatatatcttcccgcagcagtgccaaatggggaaaaggaaccagggcgaatatcgtaaaagattcggtgacggctctcggccacccttcgatatcgccggacggcaagtatctgtattttgtgtcggatgccgtaggtggttatggaggcaaagacctgtttcgggcgcgtgtcgtgggcagtgacttcggaccgatggaaaatctggggcctgatattaatacgcctggtgatgagatgtttccttatgtgcgggattccgtaacgctttattttgcttccgatggacatccgggaatgggtgggttggatattttcaaagcaaccttggacagcacgggcaagtggaatgtcgagaatatgaaggcgccgatcaactcgtccggcgatgatttcggtatcacgtttgccggaaataaagaaagtggcttttttagttccaatcgcaatgatgcgcgtggatatgaccatttgtattctttcgaattgccggttatcactatctttatcgaaggtatcgtgtcggatgtggacgagaacccgatagaagatgctacggtccgtattgtcggaagggatggtttgaacgaaaaagttttggcaaagaaagacggtaagtacagggttgaactggaacgtgatatccgctatgtgatgatggcaagcgcacgtggatacttgaatcagaattttgagttgaaaacagggccggaggagaagaacgaaacatatatcgtggactttttcctttccccgatcagtaaacctgtcgtgatcgaaaatattttctatgatttcgacaaggcgactttgcgtccggaatcgaagaaagcgttggatgaaatgattaagatgctgaacgacaatccgaatgtaacgatcgagttaggagcgcatactgaccggaaaggttcggagcagtacaacgaacggttggcgcagcggcgagcacagtcggttgtcgactatctgattgccggaggaattgcccaagaccgacttgaggctaaagggtatggcgaaagtgttcctaaagcaatcaataagaggatggccaagaattatgatttcctgaatgaaggagatgtcctgaccgaaaaattcatagaaagaatgactcctgagcagcaagagattgcagatcagataaaccgtcggacggaatttaaagtcttgcggacgaactataatttattttgatttatcgataaggtaaaaaaatataaggtacctcgaattttaacctgtagctcgtaagaggttatctacagaacaccgacatttttttctgaatgagccagtcggttttcggataacctcttacttttttccataagaccgttaattatttgtttctctggttttttaattgctgataaatcatatctttgcgggaataaaaacaagatactatgaggataagaatactttacctattattttttatattgatcttttgcaactgcaacggccaacaggtggagaaaacggaagcaggaaacacgaaagaacatacttttcaaatggtttctgttcccagtgtcattacagaaccggaagaacgcgccgcttacttggtaaaacattattgggataagttcgattttacggatacaactctgattcatttcccggaaattacggagcaagcgacttccaattatatcgatatgatgaaatatgtcccggcgaaagtggctgcttcttctatcaaagagatgatgagtaaagcgtcgaccgatagttcgatgttcgtctatttttccggcctgtatgaaaaatatctttatgatccgaattctcccatgagggatgagtctttgtatatttatgtattggatgctgtattggaagctccgtttctggatgaagtcagtaaaatacgtccggcccatttgctcgaattagctcttaagaacagggtgggagaaccggctacagatttcacgtacacgctggtggacggtaaaaaaggaactttgtatcgtacgaaagctgattgtctactcttgtttttctataatccggattgccatgcctgtaaggaaattacggatcagctcgctgcttcgccgtttgtgacggagtggatcaagaataacaagcttaaaatcctggctgtttacccggatgaggatttggaggcctggaaaaaacatatttcctatatgcctgcaggctggatcaattcttatgacagtacggtgagtttgaaaaatgatgagatttatgatctgaaagcgataccgaccctttatctgttggacaaggataaaaaagttgtattgaaggatgtgacatttaatcaggtagagaattatttaaaacaataacaaacgatatgaaagtaaggactattttattatcaatggttttagttgccggagtcagcctgaatgtttcggctcagtttaaaatcggaggtaaatccatcaatactaaaaaattagtgaatgcagcatccgatgcagcaaaagcggtgactttgtcggacgaggacgtggctgccatggctcgcgagtatatccagtggatggatacgcataatgagattgccggaccggaaacggcgatgggacagcgtttggcaaatctgacgaaagatatcaaggtcgaaggtctcgatctgaattttaaggtgtataatgtgatcgacgtgaacgcgtttgcttgcggcgacggaagcgttcgtgtttgtggaggcttgatgaagattatggatgataatgaagtgctggccgttatcggtcatgagatcggtcatgttttacatacggattcgaaagacgccatgaagcaggcttatctgacttcggcctccaagaatgctgtcggggctgccaacaatacggttgccaagctgaccgattcgcaattggggagtttggccgaaacgcttgccagtgcacagtattcgcaaaagcaggagaatgcggcagacgattatggctttgagttcagtatcgcgaacggtatcgatccttatagtatgtataattcgcttaataaactcttggaattaagtgtggaagctcccaaatcatctaagttccgccaactgttttcgagtcatcccgaaacacaaaagcgtgtcaaaaggatgaaagaaaaagcggatgaatatacaaagaatcagcaataaactgttaatcacctttaaacagtcgatttgcaggctaaaataatgctaaaaaattaaatattctgccgtaaaactatgctgaataacataaaatctatatatttgcactgtgtttttcatggtattagatttaaggttagcaatgaagattggttgtcgtgatgacaaccttttctttttttaggccctttgtatttttcttttctttcgaaagtttttaagattccgaaataatattacttttgtgtattgactaaaaaactaaatagtgtggatacaagaataaaattgcgggtgcaaggtttaacgaacagtcagatacagtcaggtgcttatgccttgattcttgctgaagaagatggggttcgccgcatacctatcattgttgggacatcggaagcccagtctattgcgatcgctttggaacgcatcacgcctcctcgtcctttgacgcatgatttgtttgcaacttttgcacaggcattcggtgttcgtttgtgtgaggtttttatctataagtttgaagatggtgtattttattccgaactgctttttgaggatggaataaaacagattcgcttggattcgcgtacttccgatgctatcgccatcgctttgcgtgtgaaatgcgatatctatacgacacctgagattgtccgtgaatgtggtgtcgtgcttgaaaattccgcagaggagaaagacaaggatgatgattccatattggctctggagccggaggaaatacatgatgaaacaaagctgaaaaaatggctttcccttttggatgtcgatgaattgtcggatcgtttggatgaagcgatagccgatgagaactacgagtatgcaaagatgtacaaagatgaaatccggcgtcgtgaagaggagggcaggtctagatgatagaacaacaacttggttttagtcttgagtcttttttacgtggtatagtagggatttctacggtgttgggggttgcttatctgatgagttacgatcggaaacgggtcgattggaaattggtgggtggcggattgtttatgcagtttgtctttgctcttgccgtattgtatgtccctgtagtcggaattgttctggaatgggtgggcaaggcttttattaagttgatggattttactcagtccggggttgctttccttttagggccgttggtaactaaaagtgaagggtttatctttttgttgaactcacttccggtggtgatttttttctcggccttggtttccttattttattattgggggattatccagcgcgtagtgggaggattttcttggctgctacgacgtttcatgaatatttccggagccgaaggattggttgcgtctggcaatgtgtttttgggaatgacggaatcccctgttttgatcaagaattatctgccggcgatgaaccggtcggaaatatttctggttatggtttccggaatggggacgatagccggaacagtgatgggaacttatatcggtatgttggcgggaggtgatcctgtgtcgagggttctgtttgcgaaacatttgctttcggcctcgctgatggctgctccgggttctattgttctggctaaaatcctttgtccgcaaacggaaaaggttgacgaccgcttggtgaagatggagaaggtcggacagcattccactgtattggatgcgttggctgccggtacgtcgacgggtgtacgtctgatggtgaatatcgcagcgatgttgcttgtattcatagcaatggtcgcacttgccaattatattttggagggtgtgatcggacgctataccggattgaatgactggattgtatccattacagacgggaaggctcaaggactgacattccagtttatattgggagtgatcttatctccttttatgtggctgatcggagttccttatcaggatgtaatgttggtcggttctttgttgggacagaaaaccattttaaacgagtttgtcgcttatttccagttacaggaatggaaagatgccggtttgtttctgtatcagaaatctattttaatgtctacctatatcttatgtggttttgctaatatctcgtctattggtattttgctgggagggatgggcgtgttggctcccgaaaagagggaactgatcactcgtttcggctttccggctatgattgccggtgcgttggtatcggtactttcggctacgataataggaatgatgttaattgtcaattgacaatggggaaatcttttaatttttaacttttaatttattcaagtgcagatattttatacgccggagatagctgtgaacctagagcttccggaagaagaagccgggcattgtattcgtgtactcaggttgactgaaggtgacgagattttgttgacggatggtaaaggctttttttttaaagcggcaatcagccgtgcccatcctaagcattgcgaagtgaatattctggaacagtgggaacagcctgctttatggaacttcaatcttcatatagcagtggctccgaccaagaatatggaccgtatggagtggtttgcggagaaagcgaccgagatcggtattaatgccattacttgtttgaactgtcgtttttccgaacggaaggaaattaagcctgcccgcttggaaaagattttgatcagtgcaatgaagcaatcacagaaagcgactttgccggaactaaacggaatgaccgatttccgcacgttcgttagtctgccttttgccggtcgtaagtttattgcccattgcgaggaaggggtaaaacctcttttgaaacaaacgtatcatccgggagaaaacgcacttgtcctgatcggtccggaaggcgatttcagtcccgaagaaatagcgcttgccttaaaatgtggattcgaacctatttcgttaggcgaaagtcgtttgcgtacggaaacggcggcattggtcgcttgccatacgatacatgtgttgaatcagtaataacaaacaatgaccgaaaaagaaaaatgccgtctcggcctgttgtatgatgctaattatgatccagaaatattggcggatcgtgagcgtgcaaaagagttactttatgattataaccgtttacgtccttccgagcagatcaggcggacggaacttctgaaaaaacttttggggaagaccagggagaacttgatcatagaacctccttttgcctgtgactacgggtataacatagaagtgggagagaacttttatgcgaatgtcaatctggttatattggacggggcaaaggtctgtataggagataatgcttttatcgcccccaatgtcggcatttatacggcaggacatccattggacgcatccgatcgcaacaagggtttggagtatgcttacccgatcacgatcggtaataatgtatggatcggtgccggagccatcatccttcctggtgttacaataggtaataacgtggtgatcggagccggtagcgtagtaacaaaaaatatacccgcctattcacttgcagtcggaaacccttgccgggtgatcaagcggatagacgagtaatatttttgaatgtttcctttttatcttattcccattcgatcgtcgcattgggtttcggagacatatcgtagcaaacgcggttgacgtttttgacttcttttagaatgcggtccgtaatcttcattaggataggccaatcgacgggttcgatagtagccgtcatggcatctaccgtattgacggcacggatgataacaggccattcaaaggaacgtgcattgtcgcgtacacctacggatttgaagtcaggcacaacggtgaaatactgccaaactttcttgtctaatccagctttttggaattcttcacgcaggatggcatccgcttctcgaaccgcttccagtctgtcgcgtgtgatagcacctaagcaacgcactcctaaacctggaccggggaacggctggcggaagaccatttcgtaaggcaagcccaattcgagaccgcaagcgcgaacttcgtccttgaacaactggcgtaatggttcgaccaattcgaatttcaggtcttcgggcagaccacctacgttgtggtgggatttcaccatcttggctgtctttgtaccgctttccacgatatcgggatagatagtaccttgcgctaagaagtcgatgccatccagtttgcgtgcctcttcttcaaagacacggataaattcgccaccgatgattttgcgtttttcttccggatcggcaacgccagccagcttatctaagaaacgatcggtaacgtctttataaatcaggtttgcattcaactggttcttgaaaatttcaacgacattttccgattcacctttacgcattagaccgtgatttacgtgtacgcaaaccaacttgtccccgatagctttcagaagcaatgcggcaacaacggaactatcgactccgccagaaagtgccaacaatacctttctgtcaccgacctgacgtcttaccagttcgatttggtcattgacgaagttcgtcatattccagttcgcttcggctttacaagtgtcgaatacgaatgtttttaccgattctttgatagcctccatgtcactggagaattcatttaattttacttcgcagagagccttgtcgtggccggctgccataacagggattccaatcgaatagattcccggatttacatcaatggcgacaccgtcgattacattgttaggaccaccgttgatgatgataccttttacattcggaagtgctttgagttcttcaaccgtaatgtcgtgcggatagatttcgctatagacacccaacgcgcggattgctcgtgccagcacagtgttttcatgactgcccaaatccaggataacaatcatatcttgtttcatacgattctttattttttattggttttacattatgtatacttgaaatgcggatatggaattttactcccactcgattgttgcgggcggttttgagctgatgtcgtagacaacgcggtttactcctttgactttgttgatgatttcgttggacactttcgcaaggaattcgtatgggagttgcgcccagtcagccgtcatggcatccgtcgaggttacagcacgcaaagcaaccgtattttcgtaggtccgttcgtcccccataacacctacggactggatcgggaggagaatcactccggcctgccagattttgtcgtacaagccccattcacgcatcagcgacatatagatatcgtcggcctcttgcaagattcgtactttttccggggtgatatcacctaaaatacgaatacctaaaccgggaccggggaacggatgacgtttgatcagatgtggttgcatacctaactccataccgacacgacgtacttcgtctttgaacagaaggcgtagcggttcgaccagtttcaggttcattttggcaggcagaccgcctacattatgatggctcttgataacagttccggtaatggatagcgattcgattacgtccggataaatggtaccttgacctaaccattttatatctttcaacttgtgggcctcttcgtcaaacacatcgataaaacctttgccgatgatcttacgtttcttttcaggttcgctgacacctgccagttccttatagaatttctctttggcgtcgactccgatcacgttcagtcccaagtgttcgtaatctttcaacacgttttcaaattcattcttgcgcaacaagccgtggtcgacgaagatgcaagtcaggttcttgccgatagccttgtgtagcagaacagccgtaaccgaagaatccacaccgccggaaagcgctaagattactttgtcgtctcccaattgttctttcagttcggcaacggtcgattcgataaaggaggccggtgtccagtctttggcgcatccgcaaatattcaggaagttgtttaataatttagtaccgtctgtcgagtggaatacttccgggtgaaattgtacgccccaggtttgttcaccttccacatgataggcagctgcttttacatcgtccgtgctggcgattactttgaagttttcaggaaggaccgtgatggtgtctccgtgtgacatccagatttgtgaacctacattgatgcctttcagcaattcgtctgtattgtcgatatacgacaggttggcacgtccgtattcgcgggagtcggccggttcaacgtttccaccggatgtataagccaggaattgggctccgtaacagattcccaatacaggatatttaccgcgtatttcacttaagtcagctttgaacgcattggcgtcatatacggaatagggacttccggaaaggattacgccttttacacctgtagcatcgtgggggaatttgttgtaggggacaatctcgcaatacatattcaactcacggactctacgcccgattaattgagttgtttgcgagccgaaatcaagaataataagtttctcgtgcatgcaaattattatttaattgagtggcacaaaggtaggaataatattcgaaatttaaatcatttttcatacctttgcgtgttcatttttaatcgtaaccgtatggatgctgaaaagaaagagacaaaagaaataaataagatgtcattgctgatcatggcagtggttgtgttattgttgattatcgccggtgctgcctactatattttccatcagaatcagcagatggaggacttggagcaggcttatgttctggataaggaatcattggaagacgaatttaacgaattgtctctccaatatgaaggatataaatttaatataggtaacgactccttactgaatctattgtctaccgagcaagctaaagtacaacgcttacaggaagaacttcgtactgtaaaggcgacaaatacgaaagagattgcccgtctaaagaaggaattgcagacattgcgtaagatcatgcgtaattatgtagttcagatcgactctctgaatcgtgctaacgaacaattgaaagttgaaaagaatgaagcggtaaagaaatacaagcaggcttcttctacggctaccactttgaagaaggaaaaagagaaactgacggaacgtgtcacattggcaagccgtttggatgcgacgggtatcaatgtaactcctgtcaatggtcgcggaaaaaaggcaaaggtgatcaagaagatggaacaatttgtcgttgacttccggatcagcaagaacattacggctccggtcggagagaagacgatctatgtgcgcatcatgaagccggacgacgatatcctgttgaagagccgtgccgatgtatttaccttcgaaggaaaagaaatcaattactccatgaagaaactggtcgaatatgacggtgaggaattgccggttacgatgtactggaatatcgaagaatttctttctccgggtacatatcgggtcgatatatttgcggatggcaatttgatcggccgtaaaagtttcacactcgaaaaatagcaatggaaacagatgtccattttgcgcgactacttgccgaccttccggaagccctcgtctgtgatgaagcttttctcggcgaactggcaaaaaacgcaaagttgatctccgtgaagaaaggagattatctgttgcgtacaggtgagttgtgtcaggatgcctatttcatcaacaaaggtcttttcatcaatttatatgtaaacgagaacggtaatgaatgtgtcaccggttttgcggctgataatatgtttccgttcctttccgccattggctattttaccaagcaaccttctgaatttgagattaaggcgcttgaagccggcgagttgctctgcttttcccgcgatcatatcgagagcctttcgttccgttatcctttgtttgcatcttattatcagaatatcatgctgacgatcatctataaactggatgttctgttggccgttcgcctctcttccacagcggaagagttcatccagtttctctacacgaactatgcctggatgatcaaccgggttcccgataagtatatcgcccattatatgggaattagtaatgcctggtattgcaagttgaagcggaaagtcctctcattcactagaacagaataggtggcggaacaagtttcatgggcatggaactgtatttttactggcgggaaactatattttcatcggtgggaaacaacggtttcatcaggatgaaaccatgtgaaactatatgcttgtgaacgtataagaaagcagttattgaattagttcaattgtatatttaaagcgaaccagtacttttgcaccgtttaggaaagaatccgaataaaacaagataaagatgaagagatttgtcgtattagttgcattactggtttcgtcgggctatgcaagtgccgggcgtacgttgacgctggaggaatgtcgtgaattggctattcagaacaacaaagagttgaagatctcgggagaaaagattaaaatggccggctatgagaaaaacgccgctttcaccaaatattttcctcaactatcggcgaccggagcgtatatgtggaaccagaaagatatcaacctcttagatatgggagcgttgagcacttctatcggaggggctctcggaccgatcgcccagttgcccgtgtttggaaagttgatggaaggggtggacgacttgcaacaccttgacatccagaatatctgggtgggaagcgtttcacttgtgcaacctgtgtttatggggggcaagattatcaattacaatcagattaccaagtacgccaagcaattggccgagtcgatgaatgaccagcaactgcaggatgtcatctgtaaaaccgatgaaacctattggcaggtgatttctttagtaaataagaagaagttagctgatgcctatgtcgatttgcttcgtaagaccgatcatgatatgacagcgatgatcaatgagggagtagcgaccgaagccgacggactctccgtcaaagtcaaactgaacgaggcagagatggcacagacgaaagtcgataacggtctggctctttcccgcatgttattggcacagatatgcgggttgcccttagaagacccgcttgttttagcagatgaagatatcgaaagttttctgacagagccttccgttacggcggccgatgtgaacgaggcctttatgaatcgtaacgagctgaagagccttgacttggcgactaagatttataagaggaaggaacggattgttttgtcggatatgttgccgaatgtggcatttatggcaaactacttggtcacgaaccctaattccatgaacggcttcaaaaacgaatttgccgggatgttcaatgtcggtgtaatggtgaaagttccgctttccggctggtgggagggcagttataagcgcaattcggctcgtgccgagacacgcatcaagtctttggagttacaggatgcacgcgagaaggtggaattgcaggtcaatcaatccgtttacaaggtcaatgaagcaaacaagaagctgatcgtttccacccgcaatatggagaatgcggaagagaatcttcgtcatgccaatctcggatttgaggaaggcgtaatcccggctcttaacctgatgcaggcgcagacggcttgggtgtcggcgcgttcctgcctgatagatgcacagatagaggtgaaattgacggaagtctacttgacgaaagcgatgggaaagctgggggatgagctctctggaagaaccaggaacgcggattaagtggatgaacacggacttgatacttttgaggacactatctaaatcatacaatcataaatctcaaattataaactcatgaacgagaataaaaaatactcaatcaataatatgctattggcatttatcacattcttaggtgtggtcggattagttgcattaaccggtttctttttactgacgccgccggatgatatcatcatggggcaagcggaggctacgcaagttcgtatttcgggaaaagttcccggacgaatcgaagcatatcgtttcagtgagggcgacaaggtgaaagtgggtgacacgcttgtcttcctggatacgcccgaagttcttgccaagcttcagcaagtggaggctgtacgtcgtgccgctgaagctcagaacgcaaaggctattaaaggtgcccgtgcacaagagatagctggagcatatgaaatgtggcagaaggcgaaggcaggattggatattgcccagaaatcatatacgcgcgtacaaaacttgttcgataaaggggtaatgtctgcccagaaacgcgatgaggcagaagccagttacaaggcaatggccgctactgagaaagctgccaaatcccagtatgatatggctgtagacggagcccgtgtggaagataaggccgcggctgccgctctcgtagggcaggctgccggagcggttgccgaagtggaatcctacttgaaggaagcggcacttgtctcaccgatcgacggggaggtgtccgaacgttttcctgaagtgggcgagttggtcggtacgggtgctccgattatgaatatcaccgaccttaacgatatgtgggtgaccttcagtatccgtgaagatcatctgaaaaacatcaagatcggtaccgaattagacgcttttatcccggcgttggataaccggccggtcaaactgaaagtttattatatgaaggatatgggaacttatgccgcctggaaagcgacaaaaacgaacggacagtttgactccaagacattcgaggtgcgtgcccgtccaatggaaaaggtggccgacttacgtcctggaatgtcggtcattaagaaattgacgattgataattgacaattaaagaacaaggttaaatgaataatgaaaaattaaatagtaccccaaaattgtcaattgcaaagcgtgagatattcaggatttgtaaagacccggtctacttcttttgtatgttggtggctcccactatctgtgtggtcttttttctttcgttgatgaaggagggtttgcctaccgatatgcctgttgcggtagtagatctggacggctcttccaactcccgtaacttagcccgccagttggatgcattcgagcagacgaaggtgatgctgacaaccgtctcgtttgaggaagctcgccaggctatgcaggaagggaaagtttatggcattttttatattccgaaggactttggtgtggatgcgacagctggtcggcagcctaagctgtcgttctatacgaacggtacttatcttattgctgcatctctgttgtttcgggatatgaaaaccatgtctgtcttagcaggtgcttcggtcgggcttcagacgggactggcgcatggctatactgaaaaccagatcatggcgcagctccagccgatcgtgatcgatacacacgcgatcgggaatccttggcttaactattcggtctatctgaataacacacttttgcctggtgttttacaattgatgatttttttggtgacggtattgagcatcggttccgagattaaatactcgacggcccgcgaatggttgcagatgggtggaaattcgcttacggtgagcctcatagggaagatattccctcatacggtgatttttacgattgtggcattcctgtatgcggtggccttgtatgggtttaattcgttcccgttgaatagtggctggttaccgatgctgtcagctctatttctgctggtgattgcttcgcaggcggtcgggattttcatgataggggtgttgccgacttttcgtttagggttgagctctgcttgcctattcgggatgatcgctttttctatcgtcggattttcttttccggtattggggatggaccctactttgcaggcactctccaacctgtttcctctccggcactattttctgatctatgtcgaccaggctttgaacggaaggcctttcttttatagctgggccgaatatgcctggcttatgggttttctcgttttgcctttcctgattggaaaaaacttgaagaacgcattgttgtactttaaatatattccgtaaaacagaaagtaatgaaaagagaatatcgtttacgagatatgatcaaggaagggatcttggacatcttttacatttggaaggatgaattgaaaaatgtcttcaaagacgagggcgtgctgatcttctttttcctggtgccttttgcctatccgttgctttattcctttatttataataatgaagtggtacgcgaggcgaagatggtggttgtggaccagtccgattcctatctaagtcgcgagtttacccgtcgtgtgaatgctacgcccgatgtcagggtagtcgccgtctcgacggatatggaggaggccaagcggatgctggacaggaaagaagcctatggaatcctttatttcccgaccgagttcagtaagaatttgcatacgggcaagcagacgacagttcccttgtattgcgatatgagcagcctgctgttttataaagcgtttttgctggcggcaacggaagtatcactcgacttagggaaagaaatacggatgcataatgctccgggtgcatcggcaaagcaggaggaaataacggtcaatccgattccttatgaatccgtgaccctcttcaatacacagaacggctttgccagttttttagttccggctatccttattttagttatccagcaaacactggttttagggatcggtatgttaggggggacagcacgtgaaaagaaccgtttccacagccttgttccgattagccggcatttcaacgggacgttgcgtatcgtgttaggcaagtctctgacctatatcttgatttatgtagttgtctgcatctgggtattagccgtcgtgccgaaactcttctccctgcctcaagtgggtgatccagttacgatcttgctgttcatcctgccgtatctgtttgcttcgatcttctttgccatgacattgtccggttttatgactacccgagaggcgcctatgctagtgtttgtctttacatctgtgatcttgttattcatatccggagtctcctggccgaaagaagcgattcctccgttctggcaggctataggatatctgtttccttcgacaccggggatccagggattcatccgtatcaatacatgtggggcggcattgaatgaggtggtacatgaatatcatacgttatggattcaggcaggtgcctattttgtactggccctcgtgatatatcgctttcaaattatccgtagccggaaaatgattataaagcagcataggtatatgaagatgaagcagactttttaatggtattcctcttgtggcttctcttgtcgtcctcttaagaggttggtaaaagaagataagaaggttttatgactccgttttgatgattttaacgttattatgttagaatccaccgaatatagttttacttttgtagaaattctcaaagcaaacttaattttttagtactatgcagaacagacgtgagtttttaaagcgggcttcgttaatgctcgcaggggggatggtgatgcctcagttgttaacttcttgtgccggtaaagcctcagcttccgagtcctccaagtatatcgggcttcagctatattctttaagagaccttgtaaaagaagaaggaatccagaaggtattggaaacggcttcgaaaatgggctataagaatcttgaaacagctagctatgacaatggcaagatctatggtttggctcctgctgagttcaagaagatggtgaatgatttgggcatgaaatgtacgagcgctcacttaggacaagctttcacaaaggaaaaagaagctgaagtgatgagttggtgggatcaggctatcgatgcccacaatgaattaggtgtcaaatacatggttcagccgtggatgccggttaccgaccagacgactttggacgatttgaagatgtattgcgactatttcaataccgttggctacaagacggcagccgccagcatcgcattcggttaccataaccatgcttttgaattccgtaaaatcggagatcaattgatttacgacttcttgttagataatgtaagtccgaatcatgtattttttgaaatggatgtgtattgggtacaggaaggcggtggtgatccggttgcttacctgaagaaccgtccgagccagttcaaggctgtccatatcaaagacgaaaaggaaatcggcgccagtggtaagatgaacttcaaacctatttttgaccagatgtacgcaaataatatcaaagattggtatgttgaagtcgaacagtatacccaaaatgatccggttgccagcgtccagcagagctatgattatctgaacaaggcggattatgtgaagtaagacgtttttgtataagttttttaggcacaggttacataaattgtaatccgtgcctaatttatttaagagatcttgattgcatttataaggttgtcccaatccttcgccaaagccgtcatgtccggataaagtaggtcggcgccagcatcgagtaaaattcggtcgtccaaaggaccagtattgactgctatcgtgaagatccctgcagctactcccgcttgtatgcccatcggggcattctctacgacaagagcttcatagggtttgactcctgccttttccaatcccatcagataaggttcgggatgaggtttgcctaacttcacgtcaaaggccgtcaccatcttttcccgtttgaaatagcccgggtaggtatgttccagcttgttgattaagctgtgttgtccggagccggttacgacaagtgtttgcaagccggaggcttttacttttttcagtacttcggccgctccttgcattgcctttccatcgttatattgattgaacaagatagctttttcttcatagatggatttcttttcctcatcggtcgcatctcgtaggaaagtcttttgatacaattcgttgatcgtgctttcacccgtccggccttcatacaggtagaatagttccggggtggagatcaactggtggtgggtagccgtttcgtaccaggcacgggcatgaaaacgcatggaatcgtaaaggacaccatccatatcgaaaagtacggccttgggagaaaatgaaacttgtcgctgtttttgcagatattgggtgattgcttcttgaatcatttttaattacttgctaatagatatttttcaggcacgatccttttgaaggagagtcgtgcctgaaaaatttttatattatgtgattgttggctacaaccgtgcgcggatcgcttcgctttccttttcgtaacccggtttgttcagcagggcaaacatgttctttttataggcttctacacctggctggtcgaacggatttactcccaacatgtaaccgctgatgccgcaggctctttcaaagaagtagaatagctggccgatgtagtaagggcttacttccggcattgtgatcttcaagttaggaacaccgccgtccacgtgagccaattgagtacctaattctgccatcttgttcacttcgtccacacgtttgccggcgaggaagttcaaaccgtccagatttgcttcgtcggttgggacgactactttgtggttcggctcttcaacagaaataacagtttcgaagatcgtgcgttcaccatcctgaatccactggcccatagagtgcagatcggttgtcagatcgacggaagcagggaaaatacccttaccgtccttgccttcgctttcaccgtacaactgtttccaccattcggcgatgtagtggagttttggatggaagttggcgaggatttcaaccttcttgccgttcttatataattcgttacgggtagcagcatagatttctgccatattttcagcaaaaggaacgcttacgtctgttgctttttccatcgaaatagctccggcaaccaaatcgcggatgctgataccggcaacggcaataggtaacaaaccaactggagtcagtacggagaaacgaccgccgacgttgtcgggaataatgaatgtcttatagccttcctggtcagccagcgtgcggagagcgcctcttttggcgtccgtgatggcgacgatacggtgtttggcttcttctttgccgactgcgtcttccagttgctttttcagcatgcggaaagctaaggccggttcggtagtcgtaccggatttggagatattgatcagaccgaactgtttgcctttcaggatttcgcaaagttcatacaagtaatcttcgccgatattgtgtccggcatatactaaaaccggatttttacggttcgtatgtaaccagtcgaagctattgtttaatgcttctaccactgcttttgttcctaaatagctgccgccgataccgatggcgacaacaacttcacatttggaacgaagtacgttagctgtattttcgatgtctgtcagttcagcatctgtaatagaagaggggaggtgcaaccaacctaaaaagtcgttacctgcaccatttccattttgtaaagtggcattacattcgtgggcctttgcagcctgagcatatacctgttctttcgttacggtacccagcgctttgtcaatgttaagactgatgttcttcatatttacattattatttaaatgtttcagtcaactgccgtatcgcggtagtcggcgatttcttttcgtatagaatactatataaagtatccaagatcggcatgtttactttatatttttcgtttatctcccgaatacattttgtcccgtaatatccttcggcgatcatctccatttcgagctgggctattttgacggaataacctttcccgatcatggtcccgaacgtacggttccggctgaagcgagaatatgcggttaccagaagatcaccgagatataccgaatctgtcacatcccgttccaggccatgtacggcgttgaggaagttacgcatctcttcgatcgcgttgcagatgaaaactgccagaaaattatctccgtacttcataccgtggcagatacctgcgacgatggcatatacgtttttcaatacggaagcatattcaatacctgtaacatccttgcaacaggagttgttcagatattggttcttaaatacggaggagaaagctcttgcattctcgatattagggcaagccagcgtgatataggacaaccgttcgagagcgatctcttcggcatggcacggaccgccgatgacagcgatattgtcaatcgggacattgtagtattcggcaaaataatcggctacgagcatgttttcgtccggaacgattcctttgatggccgaaatgatgaatttgtcttgcatggaggtcgtcaccttcatcaaatgttgtttcaaaaaaggagaaggggtggcgaaaatcaaagtgtccgaatctttgattactttgttgatatccgtgtagaatttgattttgtcagtatcaaatttgacggcggaaagatagctggggttatgtcccaacaacaaaaactcttctacttggtctggccgacgcatataccagttaatactatcttgtgtagaaagtacaatcttggccaaggcggtagcccagctaccacctcccattattgcaatttttccgggcaacttcatagtattactcttatttggctgcgcctgcaatccatgcctctacttcttcggcagtggggttttgcaattccagtttgtatttcttattcatttcgcagagttcctgtctcagcttgttgggattagcatctaccaacgtgtcggttgtgagatatccggctttatgtaaagcaggaacccatgcttcatcgatacccagtgcgacatatttgtctgcggtgtctttcttgactgtcttttccgggcgcatctgcgggaagagcaacacttcttgaatagtcgtttggccagtcatcaacatcaccagacggtcgatgccgataccgataccagacgtcggaggcataccgaattgcagtgcacgcaaaaagtcctggtcgatgaacatcgcttcgtcatctcctttttcgctcaggcgcaattgctctttgaagcgctcttcctgatcgatcggatcgttcagctcactataggcatttgccacttctttaccgttgatcatcaattcgaaacgttcggtcaatccaggtttgctccggtgcatcttggttagcggactcatctcgaccgggtagtcgataatgaaagtcggctggataaacgtgccttcgcagaattcaccgaagatttcatcgatcagcttgcctttacccattgtttcatcgatttcaaggttcaaatccttgcaaatcgtgcgtatctcgtcttcgctcttgccattcaggtcgtaacctgtcttttccttgatggcatccagaatcggcagacggcggtaaggagctttaaagttgatggtcttgccgtcgactacactttcacatgtaccgttgacggcgatacagatacgttccaatagctgttcggtgaagctcatcatccagttgtagtccttatattggacataaagttccatacaggtaaattccggattgtgggtgcgatccataccttcgttacggaagtttttaccgatttcgtagacaccttcgaaacctccgacgatcaatcgtttcagatacagttcggtagcaatacgcagatagaggtcgatatccagcgagttatggtgcgtaatgaacggacgtgcgcttgcccctccggggatggattgcaggatcggagtttccacttccgtatatccagcttcgtccagcgcggtacgcatggtcttgataactgccgcacgtttcatgaaaatatcctttacgccatcattgaccaccaggtcgacatagcgttggcgataacgcaattccggatcgttgaatccatcgtatgctacaccgtctttgtatttgacgaccggtagcggcttgagtgatttggataataccgttatctcttgtgcatggacggaaatttcgcccatctgtgtacggaatacgaaacctttgattccgacaaagtcgccgatatcgagcaatttcttgaaaacaatgttatacagatctttattttcttccgggcaaatgtcgtcacgagagatataaacctgtattctgccttctgaatcctgcaattccatgaaggaagcctttcccatgatgcggcggctcatgatgcgaccggcaatacttacagggcggggctctgcatcgtctttaaaattctcttttatctctttggaaaatgcattcgttacatactcagctgcgggataaggttctatccccatctgacgtaactgctccatgctgttacgtcttatgatttcctgttcactcagttctaatagattcattacgctattattttgtataatacggcgcaaaaatacaaaacttttcttacttattgcctaaaaacgtatgcgactttacgctttatgttcttaaaaggtattgttttgtaatggaaaaggcagattacgtatggcttcgggcaggaagaagcggacatcttttccggtcttgaaagcttcgcgtataaaggttgaggatatttcgaccaaaggggcgtctactttttttatgtgaggatattgtgccggaatttcaacatcgaatcctttgcgcggatagatgaagatcggataattggaaatgatggcttcgtattctacccaccgggtaatatatttccaattgtccgcacccatgatgaaatagaattcacggtccggataacttgcttccaatgtccggagtgtgttgatggtataagtgggttgaggaagggaaaactcgaagtcactggcgtggaacttagggtaaccagcgatggatttttttaccagttcatagcgaagccggtcatccatcagttcttccttctcttttagcgggttatggggggtgatcagaaaccatagctcgtccaactccgtaaattcacacaaccagttggctaatgccagatggccgatatgaaccggattgaatgaaccggaataaatgccggttttacgtttgctgaccgtattttctttcagtcccgtttccacttgatgatatttatgacttgtgcaccgaataccaatccggtaccggtcgctatgatatactccttataatatagggcggctgtacaagtggcaagagcgacaaatgctataccaatgaatgtatatagccatttcttggataacttcttgccgttcatgcttttttaaggaactcttttatcacttttagtgcttctttttgtgcgacttccagcttgtcattcaccacgattacgtcaaatttgtcggcaaaacccagttcaaattcggctttggcaatgcggctttcgattacttccggagcatccgtaccgcgtccttccagacgactccgcaaatcttcgatcgaggggggctggataaagaccgaaagagcacggtcgccataaaacttcttgatgttgcaacctcctacgacatcgacatcgaatataacgttatcgccactcatcagccttcgttccacctcgcttttcagcgtgccgtaatatttgtcggtatagacctcttcgtattccaggaaatctcctgctgctatacgggcacggaattcatccggtgtaaggaaataatattccactccgtccttttccgtaccacgtggggcccggctggtagccgagatggaaaaatgcaggttcagattctgcttcagcaggaaattgatgatagtggatttgcccgaaccggacggcgcggagaatatgatcagtttgccagccatatatcgtttttataatacgtttaatacttgttctttgatttgttccagttcgtctttcatctggacgacaagtttttgcatctcggcatggttgcttttcgaaccaagggtgttgatttcacgtcccatttcctgggcgatgaaaccgagtttcttaccttgtccgtgtccgctctccatcgtgctgatgtaatatttcaggtggttgtccaggcggttcttttcctcgtttacgtccagtttttcgatataatagatcatctcctgttcgaaccggttcttgtcgtagtcctgtccggcaatcttttcgagattgtccatgatacgggctttgattttttcgatccgctccttttcatactgttctacttctgaaagcaggcgggagatattggcaattttctgttcgaacaacttttgtaacatggcgccttcctgaatacggaaatcgcaaaggtgccctatggcctctttgatcgctttctcaaccacattccattcctcttcgtttacttcctgggcctctgtcttgatcacgtccggcatgcggagcagggtctggaaccagtcggcgggaagtccgatgttcaggcggtcggcaatatctttgatttgattgtaatagttttctaccgcagccaagttgatctgtgtgggcgtgtctttaccgatatattcgacaaatatattaaattcgacttttccacgttcaagcgactggagtaacaaactgcgtatttgcatttctttttctttgtagatggaaggaatgcgggtcgacaaatccagttgcttgctgttcagagcttttatttctacggttacttttttagaaggaagttcggctgtaaccttaccgaatccagtcattgattgtatcattgttctaaaaatttgtgcaaagatagctaatcaattgataattgacaattgacgattgacaatataattgagaaaaagccgaaaccatccgtgctagccttaataaaatcggttttgatcatgagattacagttatgttttatacttttgcatccattatcaaccgattggcttttgacacatattttaattgtcaattgtcaattgtcaattgtcaattaaaatgtcttgtatattaaatatcgaaacatcgacttctgtatgctctgtagcgttgtctatggatggtgaagtcctttttgcgaaggcttcgttcgacggcccttcgcatgcagccttattaggcgtatttgttgaagaagctctttccgtattgaaaaagaaggggaagaaagccttggatgccgtagcggtcagtagcggtcctggttcttataccggactccgtatcggagtgtctgtcgctaaaggtctttgctttggtttcggtattcctctgatcggcattcatacgttggacatcatggctgctactgtcaacagtaagggtgattcgcaaatcgtctctatgactgataattgcctttattgtgctatgttggatgcccggcgtatggaggtttatgccgctatctacgatgcttccttaaagcctgtccgcgagacgaaggccgatattgtggaagtcggtacgtatgcttcttatctggaaaaagggaaagtttgtttctttggcaacggtgcttccaaatgcaaatcggtcatcacttctccgaacgccatctttatcgaagacatccatcctcttgccgtaaacatgattccgctctcggaacaagcttttgccgccggcaagtttgaagacaccgcctatttcgaaccgttctacctgaaagagttccaggcgacggttgcaaaaaataaggtgcttttagctcgatgatgtagttgtgtgctatgtcggaatggcacgtttgtcgaaatttttatgtaagtccggtcaatcggaaaagaacttagatatgcaaaatcgtcctgtttcttgtgtttgatagctgcaatgtcaaacatggaaacgggacgatgtgttatttagggttgccatccatgtaagtcttcctcctgcaagcaatataaataagctgctgtaaacatccacctattatatacatacgattttttttaaatccaactatcatactatcatatttgcatataaatatctgtatattagtttataaaaatatgatagtatctattttcaactatcatttcatactatcatactatcatgtcgtatatcacatgcttctgtcttcgtgctggggaaaaataagtgtagatataattgaataaagtgctgtaaatatttgcattatagatgttttatttgtatatttgtaataagaaaagaagcccgtcatccgggtgtcggaagggggtgagaccccggtgttgataccgttcagatgggggtgtcaaaagtgttaaaatgggcgtcttgagaagaatatctggttgtttaatattaaaaaatactgttatttatggcacattactatgtagtccggcaaaaactggacaagacgggagcggaagataaagtacgctattatggtgttccagttacgtgcgggcgggtttcaacgaaaaagctggctgatttggttgccgatcgttgctcgttgagccgaggtgatgtgttcgcttcggtttgcgagatcggagggatgattcttgaattgttgaaagacggctattccgtggagttggacgggttgggtgatttttatctttcggcaggaagtgaaggcttcgaagatccgaaaaaatgtactccccatcgggtgaaggcgcgtcgtgtctgtttcaggatggctccctgcgtgagaaagagtatgaaatttgtcaaattcgaaagaaatccttggtaatgcaaatcacatattacaggcataaaaaaggcgtgttgcggatgcactcgcgtgatatggaatatattgtcgggttgctgaaaaacggcaaagatgcggaagctatattgtcggttcgtcgaaaattgaatatggcgtttttggcacgaaccacggatttgtccggaaaactaccggtcctggcttttggctcgacgttcaagaagaatggcgatggaatacagttgaggcgttataacgggtatgtcttgttggaagtgaacggcttggaaagccagagtgaggcggaggccgtccgccgtgaagctgccgccctgccgcagaccttgctggcgttcgtcgggctgagcgggcgttcggtcaagatcgtggttccttttgtgctgcccgacggctcgctgccgaaaaaagaggagcaggcccgtatgtttcatgctgcggcttatcagctggcggtgcggcattaccagccgcagttgggcagcattatatcgttgaaagaaccgttcctgtcgcgggggtgccggatgagtgtggatccggacgcctattacaatccggatgcggtggcgatccggatcgagcaacctttgcagatgccggacgggggtgacttgaagatcgtgccttctccggttcgggatccgttggagatgatggctccgggagcggatcggaacgggcagatcgccacgctgttcagtgttatcctgatggagatgacgcgtcggttttcagaaagcccggaagatgatatccaactgctgttcatcgacttggcgcaggcttgctgccggcttggaataccggaggaagaggcggtgggctggacattgcgctatgaggctttgaaaaaatataagatagacatccgtatggctttccgtacggcatatacgttggagaatgtttcaaaccgtgcggagccgctctcttccgtcccgccatccatgtcgttggtgttgcggttggacgagtttatgaaccggcgttatttcttccggacgaatgagatgagcggtggagtggaatatttggaccgttcgatgatacagttcgtttacaagccttatacgacgaaagttcggaattccatttgcctggaagcccagcaggaagggttgaatgtatgggacaaggatatcgaccggtatgtcaattccgatcgtgttccgatatatcatcctatcgaccattttcttgggaatcttccggcttgggacggaaaagaacgcatcagggcattagccgggcgtgtcccttgtgacaatccggtatggggagatttgttttaccgctggttcctaagcatggtggcacattggatggaactggattcggaacacgggaatagtacgacacctctgttggtcggtggtcaagggtgtgggaagtccacgttttgcttgaatttgttgccaccagtgttgcgtccttattatacggacagtatcgatttcggcaatcgccgtggggcggagttggctttgcaccggtatgcgttgattaatatcgatgaatttgattcagtgaaaagttctcatcaaagttttttgaagcatatcctgcaaaaagcggttgtgaacactcgtttgccttatcagagtgcgagccgtaacttgcgtcgctatgccacgtttatcgcgaccagcaacaattatgatttgctgacggatccgaccggtagccgccgtttcatttgcgtggaggtgaaggggcggatcgattatgcccagccgatcgattatgatcagttgtatgcggaagcgaaagaattgttgaggcgtggagaacgtttttggtttactccggaggaagaggcgctgatcactgaaaacaacagggatttccagcagcagccggctgaagagcaactgttcctgcgttatttcaagatcgcggaggatattgaagaggcaaagccgcttctggcgtccgagatactggatatgatcgcggagaaacaacccggttttaacattacaaaaacgatgatccttaatttcggcaagcttttgaagcggaatagcgtgccgaataagcggacgatgagggggacttgttattatgtggaagaagtagatgattgatatataattgattgactaattttatgtatgatggtatgatagtagccatgacagttgttttgcgaactgtcatggctgttttgtgttgatatatagtgggttattgccaattatgatggtatgatagttggatcgtctatttccaattgtatttgtaagtgaagaaaaaacattctttctaaaatatttactcagttaaataaagaacaaaagtaaggaacggttaaaccaaaaaagggggtgtcttgtttaatcttcaaatcaatattgaagaatagacatgagacgaaagaatacgaatgtactgctggtctttggtgtggtgatcgcgattatcctgttaatgatttggttgtttttggggacaacattggaacaggaggcaaatccagagacagatccgatgaccgtcgaacaaaatatctgataaggtcggatataaaaaggaaggctgtgtcgtaaatagttttttatgatgcagccattaatatacttctgatgaatcgttgtgcgcatatacaaacttacccaagaatacgttaaagtccgtaaacttgggtaagtttttatatttggagatgacttggagttcagctcctttttatgtagaataagtgaattatcctaagaatcccaacaggataccggctgctacggcagaaccgattacacctgctacgttcggacccatggcgtgcatcaacaggtagttggtcggatcatattccagacctacgttctgagagatacgggcagagtcgggcacggcagacacaccggagttaccgataagcggattgatcttattgccttctttcaagaacaggttgaagaacttcacgaacaggatacctgcacaagttgcgatcacgaatgacaatgctcccaaaccgaagatcttgatggagttcaatgtcaggaactgggttgcttgagtagaagcacctaccgtaatacctaacaggatcgtgatcgtatcaatcagcggaccacgggctgtttcagccaaacgacgtgttacaccactttctttcaacaaatttccgaagaacagcatacccaacagaggcagaccggaaggaacaaggaagcaagtcagcaacaggcctacgatcgggaatacgatcttttccgtggaagaaacggctctcggcggtttcatacggatcagacgttctttctgagtcgtcagcaggcgcatgaacggaggctggataataggaaccagcgccatataagagtatgccgatactgcaatagcacccatcaagttcggagctaacttggaagaaaggaagattgctgtcgggccgtcggcaccaccgatgataccgattgcaccggcctggttcggttcaaatcccatttgaagagcgatgatatatgctccgaaaataccgaactgagccgctgcaccgatcaacatcagtttaggattggagatcaatgcggagaaatcggtcatggccccgataccgaggaagatcaacggcggataccatccggaggttacaccctggtagaggatgttcagcacagaaccttgttcgtaaatacccacctgcaatcctgcatctttgaacggaatgttaccgatcaggataccgaatccgatagggataaggagcataggctcgaattcatatttaatagccaggaagatgaacaacagaccgacaaggatcatgataaggtgacccggtgtcgcgttgtagactcctgtataagtgaggaacaactccaagttttctcccaagaactggagaaagctttcatgagccgtacctgctgcctgtaataatactgatcctaacataatattatcctattacgacgaggtcagcaccttccagtacggaatcccctttgtttacttttatttcaatgattttgccgtcacggtcggcattgatgttgttttccatcttcatggcttcgaggacaagtagattctggcctctcttgacagtatcaccgactttacagttaacctgcaggattacacctggcagcggagatttgacagcgcccttggtggttgaggctgccggacgggaaataaccggttcgccacttgccgttgtaggagcttgagccgggcgcttcagtgtaaccatctgtttttttgccggtttctccatttttacctgatagggagtaccgtttacttctacttcagcgatgtcatccactaccgagctgatatgtactttatatacgttaccgttaatagtatatttaaaacttttcattcttgtttgtttttagagataattactttttgggaacttcacgcagaccgtaaatcttggaactccacggagaataagatctttgaaccttgcggatcgtcagaaccgtatgttcgatgtcgtggttgtcatcgctcatttcgtatagagccgcaccgatagccgcaaagatttccccggattcctgacctgcattgtctgcaataacagccgctccggccgctttctgtgcattgcgtttgctggccgcgatcgagagctttccgatttgtttaaagatgatgaacaacaggaataatccggagaacacaactgccatggcagtcagggtcataccgataccccaagaatcattttctttaaagttctcgattttctcgttagaatccaatgttacgttattggtgctgggtgtaacttttgtcagagctgtccattcaccttgtccgtctaaagttctaccatagctgacatctgctttttgtgaagcagggataacgatctcatcgatcagagttttaccgtctgcatcgtataacgcaatgtaattttcttttgatgggtcgagcgtgaaattgacatggaatgttccccgatccggttctccgtctgcccagaacaaagtgtgctggcgaggaggaattactgttagaacgtcgcccttcggaatcggatactttttcgggttgctcttgtcattagtcaagtagcaaccggcgatattgaccgaaccggccgaattgttgaacaattcgatccaggcatggcgtttgccgtaatcatcaacaaagttatcttcgttgatgaccagcacttcatttattcgcatggaggttgcacgctgtgcttttgccccgaatgaaacgagcaacgcgaacagcagcaatacccctattttcttattaatcatattcatttcctgttttaagaattatagaggcagattgtcatgtttcttggcaggattgcttaacttcttggtctgcaattgttgtaaagcacgaataatacggaaacgagtgttacgaggttcgataacatcgtcgatatagccatattgagctgcattgtatgggtttgcaaatgcttttttgtattcggcttctttttctgcagcgcaagctttcggatcttccgaggcagccacttcttttgcaaagatcacttctacagcgccgcttgggcccataactgcgatttcggctgtcggccatgcgtagttcatatcgccacgcagatgtttggagctcatcacacaataggctccaccgtaagatttacgcaatgttacagttactttaggcactgtggcttcgccgtaagcgtaaagcaatttggctccgtgcaggataacgccgttgtattcctggcctgtacccggtaagaatcccggtacgtcaactaatgtaaccaaaggaatgttgaaagcatcacagaaacggacgaaacggcctgccttgcgggaggcgttgctgtccagacagcctgccattactttcggctggttggctacgataccgacagtctggccgttaaaacgggcgaaaccgacgataatgttcttggcatagtcggcatgtacttccagaaattcgccgttatcgatgatggttccgataacttcatacatatcgtaagcctggttaggattgtcagggatgatgtcgttcaggttgtcatccagacggtcgatcgggtctttacattcgatcagaggagtttcttccaggttgttctgcggcaggaagctgatcaatttgcggatcaactgtaaaccgtcttcttccgtatcgactgcgaagtgggccacaccggatttggtcgtatgtacgcttgcgccacctaattgttcctgtgtaacgtcttcgcctgtaactgtttttactactttcggaccagtcaggaacatgtaacttgttccgcgggtcatgatattgaagtctgtcagggcaggagagtaaaccgcaccgccggcacatggaccgaagataccggaaatctgaggaataaccccggaagccaagatattacgttggaagatttctgcataaccggccaaggcgttgacaccttcctggatacgtgcaccacccgagtcattcaagccgataacgggagcacccattttcatagcctgatccatgactttacagatcttcatggccagtgcttcggataaagcaccgccgaatacagtgaaatcctgagcataaatatataccagacgtccgtcgatcgttccgtaacctgttacgataccgtcgcccaaatacttagttttttcaataccgaagtttgtacaacgatgttgtacgaacatatcgaattcttcaaaacttccctcatccagcaacatggcaatacgttcgcgtgcggtgtatttaccttttttgtgctgagattcgattcttttttctccaccacctaaacgagctgtttcgcgaagggcgataagctcctttactttttcaagttggttactcattgtactatagatttgttgttagaaatgaacttatttaattggcaattaacgattgagaattgacaattgaatagcatcaaataattgtcaattctcaattgtcaattgtttcttattttcccggcatgcaaagttcggtcagaacgctgcatgtcgatttcgggtgaaggaatgcaatgttcaagccttctgcacctccacgaggagctttgtcgatcagcttgacaccttttgattcggcttcgtccaatgctgcctgtacgtcgggaacagcaaatgcaatgtggtggataccttcacctttcttttcgataaatttagcgattgtactgtcttcacttgtcggctccagcaactcgatcttagtctggcctactttaaagaatgcagtttttactttctggtctgctacttcttcgatgttgtagcattttagtcctaaaacttcttcataatacggcaggcaagcttcgatgctctttactgcgatacccaaatgttcgatatgtgtaagttccatgtcaataataatttagtaatttaatattgctttttgttctatgttggcaaaggtacactctttttattaatagagaaataattcgttaatatttatcagcatgatccggatatgtttaaaaagcatatttttgaaatcatgtggttaaaaatcaacgataagtcgaatattcaattgtcttccggtcaggtaattagggattgcgtactggtggttgtctatattggtaatccaataataggaactagtgttctttatgtcgaacaagttgaaaatatccaatccgagccaaatgttcttgagattgcggaagaatccgcgatccatgattgcatccgttcccccggcaagctggtaggagaaaccgaggtctacgcgtttgtaggtcggagtacggaaatagccgtcctcgtagcctgtacgtggggctgtgacgggaaggccgccggacagtacgcctttcagattcagtttgacacgtttgtatccggggaaataatcctgaaaaaagagcgagacattataaccttggctgttaggcatcggtacatattcgctccctcggatgctttgctccgctttcattagggagaagctgatccaggagtccgtacccggaacaaattcgccgaagaatttgacatcgagccccatcgcatggccttgcgcacagttctcgccgtagtatcggattttgacattatccaccgtataggggttcaggttatccaattttttataatacatatcggcactgactttgaaatttctgccggatgcccggaatgtataatcgcctcctgcaatgacatggatggaccgctgtgatttcaggtttttgttcagttgtatgatactgttgccgtgttcgtcctgcacagttgtacgtaattccttatagaacggagactgataatacagaccggaagccagccgaaatgtcaggttctggtcgaagttcggaatgaaacctattgaagcacgcgggctgaatataaattccctgttataactccaatagctgccgcgtacaccaccaaccagcgtgaacagtccttgtttggtacgaaacttgaatacatcctgcaaataaccggaaatacgtgtgctttccagtttgttatccgagaacaggtttgcgatcacgttgacattcccgcccccttgcggtaacgagtatccggcggagtcgcgtttttcccattcgctgatcttgtcgttgattttctccaactggacggtagcaccccatttcaacgtattgttttttatgcgagcgacaccataatgcccgacattcatgatattggagtgcagacggttgcgagcgtgctcgttatagcgtgcgatggataaattctgtatttctccgcctccttcttcggctgcatctcccagccagtaatcaccggcaatatcatatccttcctcttccttactggtaaaggcggatgcttgcaagccgagttccgtattgtcgttcaggttatgctttaaagtgagtgctccgaataacgtttcgaacttatcccgttcctggccactcatgaatactttaaattttttggcatttgttgccgttccaaaagaagtctctcgggtgtggggaatgaacttataattgtttatggctaagtttccgagaaagttgatctcccatttgggagcaagctggtatgtcatataagtctgcaaatcaatgaaattaggatcatattcggcatccgtatcggttgttttcaaaagagatcgtcctgttttgtaacggaaaccggtcacctgtgtgaacttgccggaagaactgcccacataagcattggctcccagcaggctggcggaagccgaaccttcgaatcctttcggttttttgtaggtgatgtccagcacggaactcatcttgtccccataacgggcttcgaatcctccggcggagaaattgacggcttccgtcatgtccgggttgataaaactcaacccttcctgttgtccggaacggatgagcagcggacggaacacttccagtccgttcacatatacgatgttttcgtcataactgccgccgcgtacggagtattgcgaacttaattcgttattggaagtaacgcctgcaaatgtaacgaccagactttcaatgcttcctccggcagggtcggggagtagtttgacgcggtcggcattcagggtttcaagggtggttgtctgctttcggatggcggtagctacgacttctcccagttcgagtgatgtatagttcatctgcacgttgagacgcatatctttggttacctgaggtaggatcctttcggccttgttgtagcccaggcatgaatagataagcgtcaccgagtcaccggtagcgaccgaaagcgagtagtggcctttttcattactcatcgtcccgtttaacgtgttcttgacccggatattgaccaagtccagcggattaccgtccgcgtcgcggatataaccgctgattttggcacgtccctgcccgaaagcacttatcgaaaataatataaatagtagtgtagctattgcacgaatcttcatattccatctaattattaaatctacaaacgcgggaaacaacgatttattttcaatgaaaggcaatttctcactatctttgtgccttatataaataattaaggaaagaagatgcctttaaacctacagaagaacttgccagctgttgagctgttgaagaaagagcacatctttgtgatggactcgttgcgtgcgtctgagcaggacattcgtccgctacgtgtagttgtgctgaacttgatgccactgaagatcacgacggagacggaccttgttcgcctcctgagcaatacccccttgcaagtggagctcgactttatgaagataaaaggccatactcccaagaacacgccgatcgagcatatgaaggaattctataaagactttgacgagatgcaggatgatttttacgacggcatgattatcacaggtgctccggtagagcagatgcctttcgaggaagtgaactattgggaggaagtgaccgagatattcgattgggcgcgtacgcatgtgacttctaccttatatatatgctgggcggcgcaagccgggttgtaccatttttatggtgtccccaaatatgatctgccagccaagatgttcggcgtgttccgccatacgttgcgcgagccctatgtgccgatcttccgaggcttcgacgacgagttctatgtgccgcacagccggcatacggagatacgccgcgaggatgtgatgaaagttcccgatttgacgctcttgtccgaaagcgaagagtctggtgtctatatggcgatggcgcgcggaggacgcgagttttttatcaccgggcattccgaatactcgccttacacgctgaatgacgagtatatgcgcgacgtgaacaagggattgccaattgccgttccccgtaactattaccgtaataacaatccggccctcggtccggtggtccgctggcgtggtcatgccaatcttctgttcaccaactggctgaactattatgtctatcaggaaaccccgttccgtatcgaggatatcagcaagttgggtgatttgtaatcaagaaataagaaataatagcatgcaaacaaaatcccgtcctatagaacttctctctccggctaaagacctcaattgcgggattgaagcgattaatcacggtgccgatgccgtctatatcggtgcacccaagttcggtgcgcgtgctgctgccggcaactctttggaagatatacgcgagctttgcgagtatgcgcatctgtatggcgcccgcatctatgttacgcttaacacgatattgaaagaagatgagttggaagaagccgaacggatgatctgggatctctggcgtgtcgggacggatgccctgatcattcaggatatggggattacccggctgaacctgcctcctattccgcttcacgccagcacgcagacggacaaccgcacaccggaaaaggtccgtttcctcgaagccgcaggctttacacaggtggttctggcacgtgaattgtcgctgaacgagattcgccggatatcggaagcgactaccgttccgctggaagtattcgtgcacggcgccctctgcgtcagctatagcgggcaatgttatctgagcgccgctttgagtggacgtagtgccaatcgcggagaatgcgcccaatattgccgcctgccctatacgatggtcgatgcgacagggacggagatcgtcacccataaacacttgctttcgctcaaggacatgaaccgctccgatcagctggaagccctgttggatgcaggtgtttcttccctcaagatcgaagggcggttgaaagatgtcggctatgtcaagaatatcacggcttattatcggaagaagttagatgcagtcctgtcccgccgtccggaatatcgtcgtgcttctgctggtcgaagcacttatacgttcgagccggtagctgaaaagagttttaaccgtgggttcaccccgttccttttggagggacggacggcggatattaccgctttcaatacgcctaaatcgctgggtgaacctgtcgggacggtcaaagagatcaaaggcaattcttttactgtggccggcttgaagcagctgagcaacggagacgggcttgttttcttcaataggaaaggcgaattggaaggttttcgtgtaaaccgggtggaggcaaaccgggtgtttccgctggatatgccgcagcttacccccaagactccgctttaccgcaatttcgaccaggcatttgataaactgctcgccaagccttcagccgaacgcaagctgtccgtggagatcgagttcttggacaatcccttcggttttacgctttgtatggaggatgagacgggagcacggatcatgctgaccgagccgtttgcgaaagagctggcgcgtcgtgaacagcaggataatatacggacacagctatccaagttggggaatacgcctttcgaggcatcgaaggtggtggtcggtttgtctgaaaactggttcgttccctcttctctgcttgccgatatgcgccgtagaggagtggagaagttgctggaagcacgccgtgcccgctatcctcgtgagacagtgaaacgtgtgcagccgtccgtgtcgatacctttccccgaacgccaacttacttatttggggaatgttgccaacgggaaagcccgttcgttctaccaggatcacggggtggaacagatcgacccggcatttgaactgtctccccggaaagatgttccgttgatgtttaccaaacactgcctgcgctacagcatggggtggtgtcctacttatcagaaagacaagtctccctacaaggaaccgtattatctgctttataaagatacgcgcctccggttgcagtttgactgcaagcattgtcagatgttggtatttgaaagttgaaaattatgagaacgctattgtcaggacggataagaatgactgtccggtgaaagaagccatgatccgtttgacaaaagtattccagcaataaaggagccgataggtatgtgataacagtttcataaggatggaacgacagtttcatggggatgaaaaagaagtttcatccctatgaaaataaagtttcccttgcatgaaaataaagttttctttaaggggaacgggaaggtagtgcaaggttatatagcctttcctaataactccatatattttgccacccctttcgtgtcttctggagccggactccagggagcgaaattttccggagcgagcggagcgaacggcccttccttgatttcatatatgatagagccggattctagaactaacagcccgtgccatgttcccgcctttatttcggcgccgtaaacaccttctttcggatcgagtatctgtgtttgggtgatttcccctttgttgtcaaagaggaatacagcaatgcgaccgcgcagcaggaggaatatttcatcttttttagggttcagatggcggtgtgggcggaggtaggttcccggttccagggcattgagcaaacggttgacgggatcgtccaaatgcttatgaaaattgtagttcatgcgtagccgaggcgactgtttggcacgcccggtcgtttcattcaataaagcttcgtttatgatcttcatgcgaataattgattactggaggacgaatgtacaaaataaatattggctggtatgccatttctccgtacatttgcagaaacctgtaaataaaacagaatgaaacctgctctaacttattacgctctgctggtcttacttctggcatcctgcttttcctgcaaaacagattcggagaagaaaaagtttgttatcggcgtctcgcagtgtacgcttgaaggttcttggcgtaaatcgatgttgctggatatgaaggtgcaggcctccgaatatccgggcgtctccctgttagtcgaggatgcagcggacagtagtctgttgcaggtggagcagatacgcagcctgataaaacgtaaggtcgatctattgattatctccgccaatgaatcggaacctgtcactcctattgcgattgaggcctaccgtgccggcattccgactatcctggtagaccggaagatcagttcggacgaatatacgacttatatcggtggtaacaattacgagatcggtcgccaggccggctttttcgtgaaccgacaggtgaaagagaaatatcctaccgtattggaagtatggggcttgtccggttcttctccggcgcaggatcgccatcgcggttttatggaggttttgaactcccgcatcaaggtgaaggaaatattcgggaaatggaagccggaaacggtggagaaggagatagcggaaatggattcgctggaggaggtggatgttgtgtttgcacataatgatgtgatggcaatggctgcccgcagggcaatcgaaaggatgcatcccggattggcggacaggatttgttttgtggggatcgatgccgtttcgggacggggatcggggctggaagccgtcatgcacggagagttggccgcttcggtcttgtatccgacgggtgggagccttgctatccgtgtagccatgcagatattgaacggagaagatgtgtctcggcaatatttgctctcttctgccttgatcgataagaacaatgccggaacgctgtttatccagtctgaacaggtggtcgactatcagcaccagatcgagttgcaacgggagaatttggagagtatgctttccaaatacacgttcctccaaaactccgtcggcattatccttttgctgatggggatgttgcttttgtccgccttgtacgtgatccatgtgaaccgggcggtgaagcggaagaaccgcgagctgaaacgtacgaacttgcaggtacaacagcaaaaagaagaattggctgaggcaaaccgttatattgagaagtcgacggctcagaaactgcaattctttaccaatatcacacacgagatcaagacgccgttgacgttgatcctcggtccgctcggcaagctgtcgaaagaggctccggaaggttcttcattggcagacgatatccgtatcattcggaaaaatgcggaaaggttgaagagagtcgtggaccagttacttgattttcgaaaggtagagagcaataagatgaatatgcgggtcggagaggtagatttagttgcttttgtggcagaagtgaaatcttatttcgatacgatggctgccaccaagcagatacatttcacgtttgagcatgactgcccttctgttaatatatgggtagacagggataagatggagaagattctggccaatcttttgtccaatgcattcaagttcacgctggacggaggtacggtcacgatccatctgaaagataaaggagatcaggtcgagctttctgtcgaagataatggcaaaggtattccgtcggaaaatattgcttccgtctttgaccgtttctttaccggtgaccagaactatgtgacgggaacggggatcggcctgcacttgacgcgtgagttcgtccacatgcacaaaggcacgatccgggtggagagtgttccgcataagagtactgtctttacggtcatcctcttgaaaggtaaatctcattttgacgaatcttgtacattcgatctttccgtaaccgagctttccagtggtgtcgccgacttgaacacggatgaattgcaggaggttttgaaccgtacctacaattatactgttctggtcgtagaagatgatcttgatatacagagttacttgcaggcggaattaaaacagaacttccgtgtgttggttgccgataacggcgtgaaggctttggaggtgctgatgagcgaagaggtttcgatggttatcagcgatgtgatgatgccggaaatgaacggtttcgatctttgtcgtaagatcaagtcggatattgtcctgagccatcttccggttatgctgttgactgctttgtccgacgacaaacagcagatgtacggggctgccagtggtgcggacgcgtatatccagaaaccttttaacatagaagtcgtgaaactgcgtatcatcaagctgctggaggaccgtgtccggttgcgtgaggcttatgctcgcgatgcctcttcgcctgctgtttccgtgaaggaggaaaaagcgggaagcatggacgatctttttatgaatcgtttcttgaaactgatcgaagagtcctatgccgatccggatttcagtattgagaaaggtagtgaaaaattgggcttgtcgcgtgtgcatctttaccggaaggtgaaggagcttgccggagtgacaccgaccgatttcctgcgtaactatcgtttgaagaaagctgctgctctactccgacggaaagccgggaatgtgaatgaggtggcttatgcgacgggcttcggttcgcctgcttatttctcgaaatgttttaaagccgtttacaatattactccgacggagtatctggaaaaggaataatattcttctctttgataacgctcgttacatttgtgtaacatttgtgcatgtaactcgaaaataagagtataatgtaacaagtgttatcaatcttgtagcattagttatcgtcgcatctgctacctgtctctatctttgcatcgtagataataaattatccttgtcaaataaactataatgaaacaatgcaaagtaacaataagaaaccggtcgtagtaggcataggagaactcctgtgggacatgttgccaacaggaaagaaagcaggtggtgctcctatcaattttgtctaccacgcgtcgcggttgggggcggaaggatatgctatcagcgccgtgggagacgatgggctggggcgcgaaatcctcgaagaactggataataattcgatccggtatctgatcgagaaagtcccttatccgaccggaacggtacaggttactctgcaggatggtgtccctgactatattattaatgaacgtgtagcttgggatcatctttctccgacgtcaaatgcgattgatttggccgaacgggcggatgccatttgcttcggtacgttaggacagcgttccgcacagtcaagagagacgatacaagcgattctttcttttgccccggacgatgcttatcgttgttttgacatcaatttgcgtcagcattattatacgaaagagttgatcgaagagtcgctttatctagcaaatatgttgaaggtgaatgacggggagttggtcgtcctgcgggatatgtttcatttggaaggaacggacaaggaggtggctcattggtttatagaacactataatctccgcttggtggttctgacggccggaggagcttatagtacgatatataccgctaatgaagaatcgactttgcaaaccccggaagtgcaggtggcggatacggttggagcaggtgatgctttctccggagcattggtcatttcgttgctgaaaggggcttcgctaagggaagcgcatgaatttgccgtccgcacagctgcttatgtctgtacgaaagagggggcatggccggcatacgaggaataggtaacaagggaaatatatatacgatttgataggtttagtttttaggttagaaagattgtttagtagttaggaaaccttaacgtatagtagagcaaaaagaaaaagatggttgatgtttaggtttttttgttttggttgattgaatggctcggaacttccgggccatttttattgttgaatagctatagaaacataaatagtgaatgatatgaacaaagattttgctaagattccggagaatgccgaatcgaaagctgtggatagggaaaaggaagaataccccgtacaacaagtagctgttacttatccgataggtgagaaagaagtgaaggatgctgtcaaagaactcaatcccgatacggatagccttggaagcagaggataaagggattttaaaatggagaattgaaaattacatctgtagctaatttttaattctccattttaaatttttaaatagctccttctattttatatcttaactgatccaacatcagggcgacttcggcttcttctataccggcgatcaacaggtctgctacatcttggctgaactgttcttggaacttaaggatgttgccgttttccatttgcaccgcctgctggtaaaaggagagagcgcccttgatattctgcagtgcccattcggtatgtccggcattcagcagatcttgtgcgtggggttggttatccagtatctttttgtagtaattccgtgcttggtcgtatttccctgtcaagaaagaacaccatgcgataggtcgccatgccttatggcttttgttatccaggtaatcgactttgaagaagcatttcaacgcttcgttataatcctttagttcgagatggcaatggccaatgctgatttgaactgataaattatccggatttaaagcttcgtaccggcggtaatatttcaaagcctcttccggttgtttaagtgaacggtagcaaccggcgattcgtcggattacccatttgctttcggaattcaacaagtctgcgtgtaggtaggcttcctgggcgcccttcaagtctccttccatttgcttgcaatagccgattttctggaaaagaatgtcgctatcttgatccgtttttgccaattggttgaatatggtcagtgcatcgctaaaatagtttttacggagataatattcagcgatgtttgtaagactttctttatcagaaatataagggcgcaggatggcaagattgtggaagtcgagcggcatcgtgaagatatccgtaaaatccagatggcccggatatagtttgaagaaacgatacaggtcttgtatgtactgtccgatgatcgtatcctgttttccacgtttgttgatcaattcttctttattctgctggatcatttctgtggcctggctgtcgaattggttcatcatcatctttcgggcttctttcggcaattgcatcatgctgaaataaagcgaatatttatccgaattacacataaaagcagcgaatgtcatagagtcgagcatctgcttttcagcttcgttgtccggagtgaactgatcatcgaaataagaatgctcgattgtgaatggaagcagccagttgcttaattcatggaaaaacgggaaatttttcaaatgaacaaaggtcgagtgcatgacgtcggccccttcctgttgaagctccccgaattctaccattttctttccgagggtactgtcagaaaagaagctttcccattctgggttcatttcatttcctgtcaaatcttcaggggtgagttcgttgagattgatctttttgctgagctttggactcaattttaacatctccgggatgatctcatcctgtagtttgcgggtgatcttctctgtctcgcgggctaagatgaagcgtaggatgattgtgcggatcgttttgatgaaccccggagtttcggccaaagccgctagcctgtcagctatctgcggatataactgcgtccgttttctatatgtgtataaagtgatcaggattgaaattaatgctctgactttgacctcttcgttcggatggctggctgcgtcgaacaataaaagtatcttttctctgtcgaacgcctcttgcaatcctaacatcaaggcggaaacaatctggctaccggttgtaaaaggtagtgcattgtcgtgtagcatgccgcggatatcttcagcttcctctcttttcagaaaagaagatacccatatcttattaaagatgagaatattgaatgcgtcactttctttgtgctttccggcttcatgttctaagagcagttggtcatgcagctgtttgtaagtgagagaaggctgtatgttcaggcttcttcggcggctgtaataggataggggagattccacagctactgctttctgcttgactgaatcggccaattcataagtcgatgcctgtagattgttgtatatctgttcctgcatcggatcttttgctccttcaatccggtagcgcagcatatatttgtaggtgtcctgcagttcgttcagcttgtcctgaaaagaatattcgcgacttcctgcaataagagcctgtaaggaatcgaaggcattcttcaattctttactgtctaatgagccgactatgcggttgtatgctttgtttatttcttgtagtgtcatatattattaataacaaatggtatgccaaatgtataacaatttagcctaaattcactatctttgcacacctaaataagtttagcagatgaagaatatccgcaatttttgtattattgctcatattgaccatggtaaaagtactttggccgaccgtttgcttgagtataccaagacagtagaaggtaaagatttgcaggcgcaggttctggacgatatggacttggagcgtgaacgaggcattacgatcaagagtcatgccattcagatgaagtataattataaaggagaagaatatatcctgaatctgatcgatactccgggacatgtcgacttttcatatgaagtatcccgttcgattgcagcttgtgaaggtgctttgctgattgttgacgcagctcagggtattcaggcacagactatttccaatttgtatatggcgatagaaaatgatttggagattattccgatcatgaacaagatagaccttccgagtgcaatgccggatgaggtggaagaccagattgtcgaactgctgggatgtcctcgggaagatattctccgggccagtggtaagacgggagaaggggtatatgacattttaaatacaattgtcgaaaaagtgccggctccgaaaggtgatccggaagctccgttgcagtgcttgatttttgactctgtgtttaatcccttccgtggcattattgcttacttcaaagtcgtaaacggggtgatccgtaaaggagatcatgtcaaatttattgcaaccggtaaggagtatgatgccgatgaggttggagtattgaagcttacgatgtctcctcgtgatgagattcgtaccggggatgtcggttatattatttctggtattaaaacttctcgcgaggttcgggttggagatactatcacccatgtggcccgtccggcgaaagacgcgatagctgggttcgaagaagtgaaaccgatggtctttgccggtgtttatccgatcgacagcgaagattttgagaatttgcgcgcttctttggaaaaactccagttaaacgacgcctctttgacattccagccggaaagctcagcggcattgggctttggtttccgttgtggtttcctggggttgttgcatatggagattgtgcaggaacgtttggaccgtgagttcaatatggatgtgatcacgaccgttcctaatgtgtcttataaagtttacgataagaaaggcaactgtacggaggttcataatccgggcggcttgcccgatcctacgttgatcgaccatattgatgaaccgtacatccgtgcgtctgttattactaatacgacttttatcggtccgatcatgacactttgtctgggtaaacgtggcatattgatcaagcaggaatacatttccggtgatcgtgtcgagattcattatgatatgcctttaggtgagatcgtaatcgatttttatgacaaactgaaaagtatttctaaagggtatgcttcttttgattaccatatccatgattttcgtccgagcaagctggttaaactggatattcttctgaacggggaaccggtggacgctctttcgacgctgactcatatggacaacagcgttgccttcggccggcgtatgtgtgaaaaactgaaagagctgattcctcggcaacagttcgatatcgctatccaggcggctatcggagccaagatcattgcccgcgaaacgataaaggcagttcgtaaagatgtaacggccaaatgttatggcggtgatatctcccgtaaacgtaagttgcttgaaaaacagaaagagggaaagaaacgaatgaaacagatcggtacagttgaggttccacaaaaagcgtttttggctgtattgaaattggattaaagtttttcatgctcgtgtattcaaaaccggaggagcatggaatcgggacggcaagcaataaaaaaggatgaatctgccaagactcatccttttttattaccgtggattggatttttaatattgtctttccagaatccatgcatcctggaagtttggagcgtattttgctttgattgcatcgcggctgtccgcagcatcggctttgtcattgaaactggcgacgatcacacgaagcataccttgttcgttttctcccaaaacagcgttatatccatcgttctgcatacgttctttcaaagcgtaagcatttgttttgttcttgaaactgccgataacgacactgtagcgtttcagtctgcttgcatcttcaccttgtgcagcattaattctttctgcgcgtgtactgacgttggaagttctcggtttagaaaccggagttacctcttcaactacttcctcttcttcgactacctcgaccggaactgtcgattctttttcttttgcttgttcgtaagcagccttatacgcactctgtttaggtttacaagaacctaatgctaaaaccatacatatggaggctccaaataaccaaatcttattcatactgttcagttcttaaattaatgggacaaagatataaattatattttgtactttcgtgcccaaaacacaatatattataaactacatgaataaatctatcggaacaatggttatggcaacatccttattatttggagcttgtagtggggatggaaaaacgtgcgatcgtgcgacccaacagaaaggaaacacggaaaatgtgatcgggcgttcggatattaaagtcaaagacggacggatgacgccggaagtgctttgggcaatgggacgtatcggggggatgaatgtatctccggacggacagaaagtagtgtatactgtagcctactacagcgtaccggaaaacagaagtaatcgcgaagtgtttgttatgaatgcagacgggacggacaataagcagattacaaaaacgtcttattccgaaaatgaagctgtttggattaaaggtggaaaaaaaatcgctttcctttgcaatgaaagcggcagcagccagctttgggaaatgaatccggatggaagcgaccgcagacagctctctgaatatgaaggggatatcgaaggtttcgccttctctcccgatgagaagaaagtcctgtttatttcacaggtaaagacagtcaaaagtacggcagataaatatcccgacctggataaggctactggtattattgtcacagacctgatgtataaacattgggatgaatgggtaacaacagccccgcatccttttgttgctgattttgatggtaaggcaatcagtaaccctgtcgatattatggaaggcgaaccgtttgaaagcccgatgaaaccattcggaggaattgagcagttggcatggaatactacatcggacaagattgcttacacgagtcgtaaaaagaccggaaaggaatatgcgttgtccaccaattcggatatttatgtgtatgacctgaatacgaaaaagacggccaatatcagtgaaggtattatggggtatgacacgaatccccaatactctcccgatggcaagttcatcgcatggcagagcatggagcgtgacggttatgagtcagaccagaaccgcttgatggtcatgaacttggaaacaggtgaaaagatattcgccagcaaggattttgattccaacgtagacgggttcgtttggagtgcagatgcaaaggctctttactttacgggggtatggcatggtgagtcccaagtatataagatcgatctgacggatagcaataaaatcacgccgcttacttccggaatgtacgattatgccggtgtggctttgttgggtgaacataaactgatcgtgcagcgccattctttgagcatgggagatgaaatctattcgatcgatttggctgataataataaaatagcccagttgacaacagagaacaagcatatctatgatcagttgacaatcggtaaggtggaaggtcgttggatgaaaacgacagatggtaaacagatgcttacctgggtgatttatcctcctcatttcgatccgaataagaaatatcctaccttgttattctgcgaaggtggtcctcaaagcccggtaagccaattctggtcttaccgttggaatatgcagattatggctgctaacgactatatcgtggttgccccgaaccgccgtggccttcccggtttcggtatggagtggaacgaacaggtcagcggcgactatggaggccagtgcatgaaagactattttacggctattgacgagatggcgaaagagtcgtttgtcgataaggatcgtttgggttgtgtgggagcgagcttcggaggcttctccgtttattggttggctggtcaccacaacaaacgtttcaaagcctttattgcacatgacggtattttcaatatggaaatgcagtatctggaaacagaagaaatgtggtttgctaattgggatatgggtggtgcttactgggaaaaacagaatgcgacggcacaacgtacatttgccaattccccgcatttgtttgtcgataaatgggatacaccgattctctgcatccacggtgaaaaggattatcgaattttggctaaccagggtatggcggcgtttaatgcagccgtccttcgaggtgttccagccgagttgttaatctatcccgacgaaaaccattgggtgctgaaacctcagaatggcgtgctttggcagcgtacattcttcgaatggctggatatgtggttgaagaaataaggatttattcataaaagagaaaacgccgttccgaattgtctgggacggcgtttctttatttatactaagcaattgtgattcccgggtccagatatacatcctgtatggtgtgcagcagctctacaccgtctttcatcggacgttggaacgcttttcgcctgctgatcagtcccataccgcctgcccgcttattgacgacagccgtgtagaccgcatctttcaagtcggaagctccgtgagattcaccaccagagttgatgaggctgacacgtcccatgtagttgttggcaacctggtagcgacagaggtcaatcgggtgttctgtagctagttcggtgtacatcttttggtcgattttgccaaatttgacagttgtgaatcctccgttgttttccggtagcttctgctttatgatatctgctttgatcgtaacacccaaatggttggcttggcctgtcaggtcggctgaggcatgatagtcaacaccgtcttttttgaattcactgttgcgcaagtaacaccataagatggtggccattcctagctcgtgcgcatattcaaaagcctctgacacttcgaccaactgtcttctactttcttccgaaccgaagtagatggtagcgcctacggctgcagctcccatgtcccaggcttcttttacggagccgaacatgatctggttgtatgaattgggataagtcagtaattcgttatgattcagtttgaccacaaacggtatcttatgcgcatatttacgtgctatggaacctaagattccgaacgtagaggctactccgttacatcctccttcaatagccaacctgacgatgttttccggatcgaaatagatcgggttcggagcgaaggaagctcctgccgtatgttcgatatcttggtccacaggcagtattgagacgtatcccgtatttgccaaccgtccgcttcctaacaggcgttgcaggctgtttaatgtttggatatttctatccgagccgatccatatactgtcgatgacagacggtgaaggaatgtgtataagtgatttatcgatcgttttacaagtgtgtcccaacaggaattcgctttgttcgcctagtaggctgataatctttgaagtgtccatatttatgaaagttttttaatataacatgggccgtaaaggataggtttcatagtttttatcaattaacagatagaataaatttatgagtttttgtagggcttgttttagaatgtttccctacatttgcaaagaacaaataacaagtgttacaactattttagattatacaaccaataaaaatttacaaagatgaaaaagaaatggatttgcacagtatgcggttatgtacacgaaggtgatgaagctcctgaattctgtcctcaatgcaagcagccgaagagtaaatttaaagaaatggtagaaactaccggtgcattgacttttgccgatgaacatgtgatcggtgttgctaaaggttgtgatgaagaaatgattaaagatttgaacgcgcatttcatgggtgaatgtactgaagttggtatgtatctggctatgagtcgccaagctgaccgtgaaggttatcctgaagtagcagaagcattcaaacgctatgcttgggaagaagctgaacacgctgctaagtttgccgaactgctgggtgatgttgtttgggacacaaaaacaaacttggagaaacgtaaagacgctgaatgcggtgcttgcgaagataagaaacgtattgccactcgtgcaaaacaattaaacttggatgctatccacgacacagttcacgaaatgtgtaaggacgaagctcgccacggtaaaggatttgaaggtttatacaaccgttatttcaaataattcgcaaattcgttaacaaaggaagggcattcttttaggagagtgccctttttattggaaaaaaatgcttttgaggggacaacgaatttaaattttccctacatttgtactcgcaaacgacgacctaaggaaagctgccagagtggtcgaatgggccgcactcgaaatgcggtgtacgggtaactgtaccgggggttcgaatccctcgctttccgcagaaaagaggatgtgtccaccaaatatcatgacacaccctctttttctatgtcgtcactgatttagtgccgatatggaactgacaacttcacacatacagtttatcaaagaacatgcaacagacgatttaacccgcctgttgctttccgctgccaagtatcccggaatggatattccctttttagtcgatcagattgctgtccgaaggcagatccgggagaagttgccgtcgtggtttgagaacggacaattggtttttccggctaagattgcggcggaacagtgttcatctgaacagacagcagcttataaacaggaactgattggtgaaagttggaccatttgcgacctgacgggaggactgggaatcgatagctattttctttcccgaaaggcgaaacaattgacttatatagaacgttttcctgtttattgtgaagccgcgaaacataatttttctgtcttggaggccaacaagataacgatcataaatgctgatgccacccaagttgttgatacccttccggaggtcgatgctttctatatcgatcctgcacgccgaggagaatccaacaagcgggtttttgctttgcaggattgtgaacctaacctgcccggactgttgccggcgcttctgaaacgttccccgcatgtcattgcaaagctttcgccgatggcagatatacaaatgactttggagttgttgccggggacgacatccgtgcatgtcctttcggttaggaacgaatgcaaggaactgctttttgtggtggaacgagaggcggatggcagagaaccgttagtccggtgcatcaatttcggactggatggaatgcaatctttctcttttacattagaagaggaacgtagcgccgtattggttcctgccggtcaggtaggtacatatttgtatgaaccgaatgcctcggttttaaaagccggcgcatttaagcagattgccgtccggacgggagtgaagaagttgcaggtgaacagccatctatatacatcggaccatttagtttccgactttcccggtcgcagattccgagtggatgaagtgctgtcttttaccggaaaactctgtaaaggactatcaaagacaatcccccaagcaaatataaccgtgcgtaattttcctctctccgtagaagaactgcgtaagcggacgaagatcaccgacggaggccacgtctatctctttgcaaccaccttggtggatggagaaaaggtgctggttaagtgttccaaagcctgatcgatcaggtgaataacatcagcaccaattgtgctgaaatcacgcggataaacattgaaagcggatagacggtggcataagaaacggagggttcgtcgccatcgacagtcgtgttggcatagctcagtgccatcgggtttgccatgctcccgcagagcatacccacgttgtgcgcataatcgagtttgaaaaattgcgaagctatgaaaccgacgatcagcaccggcacgatcgtcagcagaaatccaagcccgatccaaagcaatccttctgcccgaaaaaccgtttcgaagaaatgtacacccgaatcgatccccaatcccgctaaataaataatgatccccagttgacgaagcatcaggttggcactcattgtcgtgtaggttgtcaggtggaaacgagggccgaatgcgcccatcaggattccgacgatgatcgggcctccggcgatccctaatttgactggcgtactcatccctggtaacgtgatcggcaatgctcctaacagcatccccagcgatataccaatgaagacagccaagaggttcggattgtttaaccgcttgatctcatcccctaaaatctttccgactgtgtttaccgaattcgcttctcccacgatagtcaaccggtcaccgatttgcaggcgcaggtcgggagaggccagcaggtctataccggcacggttcacacgcgtaatattgataccgtagaggttgcgaaggcggagagagcctaatttcacaccgttcacccggttgcgtgtcaccgcgatgcggcgcgagatcagttggctgtcaatggcattccagtcgatatccgccttgttccaatctacattctcctgctcgccgaaaaggactttaatattttcgacatccgatttaacggagatgatcaaaaggtggtcatgctcgtgaagtaaggtgtccgaagtcggaatgcttactttaccgtttctccatacacgtgaaataacgaaatgcttgtccgtcagcttcattacgtccttgatgctcttttcgtagatagccggattgcttacatgaaattcggcgacataggtagtcgtgtcgcgttgttcctttaagtctttctgtttcttgtcggcaaacaaggcactcaggataataatcgccaagatcacgcccactacgccgagtggataagcgacggcacacgccaaagccatgtccgtcacccctttggtattggccggatctatctgcaacaaagcctgttgggcggctcccaaagcaggcgtgttggtaacggccccgcaaagcaaaccgaccatattggaaagggaaactcctgttacccagtgcagactgactgtcataatgagtccgagcaggataacgcctaaccccatcatgttcatagctacccctcccttcttcagcgaagagaagaaaccgggaccaacctgcaaccctaatgcatagacgaaaaggatcaagccgaaactttgagcaaaatacagcatatccttattcacgacgatccctaaatgcccggcaaagataccggcaaagaatacgaatgtgatacccagtgagatcccgaatatcttgatccgtcctaaatacaatccaagtgcagagaccagtgaaataatgatgactgcctgcaccatcgtaggctctaaaaaggcctcttgtaaccaattcataaagttcccctgtttattgacggcacaaagataggacaataatttgattcgtcatctatttctctcgttcccgcgcttgacacaggctccccttattgtctttgttcgtttgtttcattacctttatccccaaaataagatcagattcatatttattaaatctggaaaaacatgtcattgaaaataatccatactgccgactggcatcttgggcaaacctttttcgggtatgaccgtgatgaggaacatgaggcatttctttcgtggttgatcgatatattgacgctacggcagactgatgtcttgctgatagcaggcgatgttttcgatgttgccaatccgtcggcagccgcccaacgccgttttttccgttttttgcgggaagcgaaccggcataacccacaattgcagatcgtgattatcgcaggtaatcatgattcggcagcccgtctggaggcgccgatacccctgttggaagaactgaatacgtcaattgtaggggttgtcccgcgaaccgacctgtgcaagatcgatttcgattcgcttctgattcctttatataataaggaaggaaaacgggaagcgatctgtctggctgttccctatcttcgtcagggagattatcccgcttcgaaagaagggaaagatacctatgtggagggcgttacccgaatgtatcgccagctctatgactatgccgacagccaaaggcaaccgggcgaggccctgtttgcgatgggacacttgcatgcgactggtgctgaactgtcggaagatgaccggagcgaacggaccatcatgggaggacttgaatctatatcggtagaagcctttaatgaggacttggcctatacggccctcggtcacatccacaaggcgcaacgggtagggggacgcgagtctgtacgctatgccggcagcccgcttccgatgtctttctccgaacagcattatcaccatcaggttgttgcctttaccctcgaaaacggatgcctgtcggatctcgaagcagtgcccatcccactccgaaccgccctgcatcggattccggcggaaccggcgtcgcctgccgaagtccttttgtcgctttccaacctaccgttggcggaagagggagccgatcgcagcctatggccttatctggaggtgcaggtactgctgacggagccagatccggggtttcggcatcgggtggaggaggcactggcggataaggctgtacgcctgacttccatcatcccttcttatccgaaaaaggagggagaggaagattctcgtcctttctcttatacggatttacaaaagatcgctccgctggatatgcttcgccatacctttacgaaccgtttcgggggagatttgccggaagagttggaaaagatgtttaacgatgtaatgcgggaggtttccctatgaagatattagcgatacgaggtcgtaacctggcctcgttggaaggtgattttgaaatagattttacggtggagccattactttcagccgggatatttgctatttccgggcctacgggagcaggtaagtccacccttttggatacgatgtgcttagctctgttcgcccgtacgcctcgtaccgaccaggcgaaagaaaataatgtcaagcttcaggatgtcagtaatgaacaattgtcgcagagcgatcctcgtttcttgctgcggcggggaacatcctccggttttgcagaagtggatttcatggccttgaacggacaccgctatcggacacgctggtcggtggcgcgggcacgcgacaaggaaaacggacggttgcagaatccgcgtttggctctgtataacctcgacaaggaggaggaagagcaagggacgcgttccgatttgcaagcccgtattatcgatttgattggcttgactttcgaacagtttacgcgttccgtattgctggcgcagaacgatttttccactttcctgaaagccgagcagggagaaaaagcttccttgttggagaagttgaccggaaccgaactctattccgccatttctcgccagatatttgaaaggaatgcgcgggcgaaagaagccttcgacttgatccaaacgcgaatacagggtatcgagctattgacggatgaggaagaaaacgacttgcgcactcgccttgccggaacggaaaaggagctgcagcgagtcgagaaagcgaaagcggagcaacaggcccttcaagaggccgtccgttctatcgaacagcagataaccatccgccaaagacaacaaaaagaggcggccgataagttggtgcacgcaacggaattgttgacggtcgctcgccatgaatacgaaaagggagtggaggaacagcaacagtctgaggctcgtttcaaatcccttcaacaggagatcttgcaggcgcgtaaactggatatccagttggatacagccatccgtgacctgtcacattcggagcagcagttgaaaaatgtaatgcttcggaaagaagaggccgaaaagaaatatcaagctgccgtcctccgccggagacagggagcggaggagattgcccgtctgaccgcttggcgcgagcgttataaaaagaaggaacgtattgcggagcaactttcagctttgttgttgcacttggatgcagcatcggccacccgttcagggatggaggcggctgtccgttcgatcgaaacgctccggcaggagatggcggcgttgaataaacaactttccgacctgcaacagaccagtgcaaacaaacagcaggcgttgaagcgggctgaagcggattaccggaatctggaagaggaactgaaagctgtcgatgcaccggctttggacaaacagatcgagaaacttcgccaggaacgggaacaattgcttatcgaacaggcacgcttggaggcttccggtaacataaaggatttacgcggcaggttgcaggatggacaaccttgtccggtttgcgggagcacgcatcatccttttgcaaatcaggttcctgtcgctcctgtttctgctctaacccttcaattgcaggatttatcgaataaaaaagaaacctacgtcgctcatacccgccatcttacccgtttgcaacagcagttgctccaactccataaagaacttgcagatagcgaggccgcctgtaaggaaatggctggtaagcaacaactcgctgccagtcggcaagagagggaagaagctattgtaaaagagcaatccaccctgttgacccagtccctttcggctgccgacctgctgttcggcaatagtgagtggcagaaagcctggttgcagaatccggaaactttccgtaaaacattgacagacttcgcccgtcagtggcatgagaataccgagaaactccatcaactggaacggcaggaaagcgcccaaaaagccgaatgcgaatctctcgcctccttccttccttctctcgaaaagcaagccgaagaatccggacagctccacgaaaagaaccgtgccgctttttcctctttgcaggcagaacgaaagaaacttttgaatggccgatctgcagatagcgtagaacaggagtacatccgacgaatggaagaactgaaagagcgtttgaaaaaactgtcggccacccagactgagcaatccggcatcgccgaccagatacgcggcattgccgaccagattgcaaaagacctgaccgaggcctctgccgacctactccggagaaaggcggctttagacaaatggacagctgattatttggattcttcgggtggagagccactcgaagttatcttgtcccggtacacacaggaaaagacggaacttgctttccggcttcgtactcagacggagaacaaggcgaaagtttccggtctgcaggaagaattgaatgtccggcgtacggaaagcgaacgttgggcgaagctgaacgaactggccggttctgccgacggcgccaagttccgtcgtatagcgcaaggatatacgctcgatatactgttgaactatgccaatgtgcaactgcgtgaattgacaaggcgctatcggctggaacgggttcccgaaacgcttgccttgcaggtgatcgaccgggatatgtgcgatgaggtgcgtaccgtccatagcctttcagggggcgaatcgttccttgtttcgttggcactggcgctaggcctgtcttccctctcatccaaccggatgcgggttgaaagccttttcattgacgaaggtttcggttctttggatgccgagacgcttcgtgtggcgatggatgctttggaaagtttgcggacgcagggacgcaagatcggcgtcatctcgcatgtgcaggaaatgacagagcgcatccctgtccgcgtacaagtaagtcgggtaggcaatggaaaaagcgttgtaagaattgagaattgacaattaaatgtgtcgaaagctaattgtcaattctcaattgttaattggctttagaatcgtggtcaagaaccacaattctaaagccgacgttcatcggccgctgccaaggcaggtaggctttacggacggccgatgtggagtatttaggacgttcacgccaggagccgcctcgtacaactttcttctcggcagtctttttgtttgccttttcttttaaaggataaggaatgtaatcggaggctgtccattccgccacattcccgttcatgtcgtacaatccccagggattgggctggtaagaggcaacagggcaactgatcagttggtggtcgtttacgttcaggattttcggtaggaaatcccagaacttgcgcatgggatcgtttgcccgcatcggtttcggatctacgcctgttaccgccagatcgacagtcgtactgtctgccaagttttcgaaagcaccgaagtcgctctccgtcgatccgaaccagaaatcatctgcgcttcccgagcgtgctgcccattcccattgtgtttcggtaggcagagaaactgtattgcctgatatttcgctgatcttttggcagaaagcattcgcttcgtcccagctgacgcgcacgacaggctgttttggccggttggctgcatagccgggggtcgtatgatctttccaagtctgtccgatgtaccggctgtcgtgttccgggaaaagtgcgcggaactgctcgttcgtgatttcggtcatgctcatccagaagccttccttcacgtttgccttgaatgctggcgaagcggagggagttcggttgttacccatcacaaagctgccggcgggaatccataccaggtcgatatgtacatccggagtgatggtgaggcggcgggtcgtttcgtctttggcagcttgccgggcagtcgccgtctgcgtgtcgaacgggaatccctttaccttgaccgggcggaccggtttggtcggcttctttatttcgactgtttcgccggtcgttgctccggtaatgccgtctgcctttttgttttctttcagccagtcggcgtagtcggcaatctctttttgccagtcaacctgtacaccgctgtatttctcggccagctccatacggcgttccacctgacctttgggagattgaggcttcaggtctatttgggtgaaagccccataataaggcgcgttgagatcgatccaggcatagagcgtccgcatgtcctcttccggaacctctacgccgtggtgtccggcttgcaggatgcggatcagttcgctgttgctcgcgtgaaactcggccggcttgaggacatagatgtctgattccggtccctggcggtacacgtatgggtgcaggttcagatagctttggtcgtactgcttgttgattttcgtcaagatacctctcttatatgtgaccatctgatccttgcggaagtccggttcggcatttttcccgttgtggcaagagacgcagttacgatccagtaccggttgcacttccagacggaacgtgaacgggcggacacctccttccggtgtttccagccggcgtgcctgcttggccgaagcaatcgtgcgtttgggaatgggtatgctgttctgatcttcatggcaaccgacgcaggagacgatctcgcccggcatcccagtcagccagctgcgcatccattggatggctgccccgtctttatccaatggctgaatggaaatcggcgtgttggcgggaatggtgaatagcgcagaaccgtcttcctcgaccgggactgttccgagtatacgtttgatatcccatccactctgtattccctgtgcatcgtgatcggaaggagctaagatataggcatactcataagcgaagatacggagtgccttgatcgtgccccggggaacgccctgcgtaccttctccttcgtagatatcctggataaagaccgtagcctctttgctgtccggcttgatcttcgaagggatgacaggaggtgtttcgcgttttaccagcgggatgggagcggtcagaccttctccttcctgctcggcaatgagtgtcaggttatcgaaaacgtcgaccaggtaaattccccaaagtgcctccttcgccggtttgcaggcgaccaggaaatacttttcgctaagcgggaacggcttcatgaactgaggccagacgccttccaccaattcgtccttgatgatcgggacgatcgggcggtctttgaacggcagttcctgtatcatccccttttcctctttccggcttttggcagggtcgaagatgacgagccgccctgaacgtgccgtcccgtgatggccggagatgatgccgatgaagcggctgctgtgcttggagagcggtttcatgtcgaacgtactgttcgggaaataggagccgctgccgtagagcgctttgttttctgtcccgtcggggttcatgtgcatcacgatacgggagaaatagtgtgtcaggtccgtatattcccaacgggtgtacatgatgcgtccgtttgggatcacgataggcgaccagttcccgtcctggtcgaaggtgaggcggcacaaggcacgcgtctcggggtcaaaggagacaaggttggctaccacatcgtcgccatgcacgcaaggaacgccgttgtaaccgatgttggtcgtcgccaccactttcccgtccggcaggtaattggcgtcgcagaattccagatccggctcatcaacggtgatcttttggtgaaggttgcttccgtcgatgttcatttcgtatatctgccacttccggttcttgtcgagcgaggagaagaggaggcggtcggcatcccagtggagctgtatgtctgaaacgggaacatcggcttcgggtttgtatatccggctgctttcgatttgtccgcgcaagcccgtgagcaggtcgatctcggcatcgtagcctttacgcgagttggaaaatagcgagttgtagttggctgtcgaagttcccatcgacgggcccatcgccttacgggccttgtttcccaaacggtaacaggccactatgatcttgtccatgtccagcagcgggttggccaggatgatctcacgcttcaaggcaagtatttcttgagcttggccaattacttcgtcgatcgtgttgccggaaaccttatcggagaaggcctgctgcacgccgggtagaagtgtttccagacgggatagtttttcgtaaagcgcgggagcttttcctcccaatgctgtttttgtgtcgtccagataggcacgtatggcagtaggatttacccatcggatttgcacttccagatcgcttagctgaatttggcgtattgaatcttgtccgttcgttgcggaaataccggatacggaaagagagaggaacgtgaagagtaaacaaactttatgcttcatatcattattattttttcaaaatctctatcactctatcacacttcgtatataaactattcatatacaactgtttgttgtgtgatatatgtcacttttatctatcactctactatcactccatctttttccaatacggcagaaaaagatacaaagcatatcgcttgttttcaacaagatagtgagatttgatgctgaacacccggatgtttgttctctgtacatccgggtgtttgccctcccgacacccggatgttaaaggtgggtttacccgggtgttcaagagcttttgcaggtacttttgtgcaaaaaagagccttgttgtgacttatttgtctgctaatttgtaaatttccgatgcagccatcaggaatgcacctgtaccatagagctcggtcatgtcgcgtgtcacctttttaggatcggcacctaccggctgaacccaccctaatttcccgttcgtttcaactgcacgggtcagtgcttcccatcctttttttacgactggcagatatttgtctgccggcagatacccctggttgattccgtatgccaagccgtaaacgataaatccggtcgcgcttgtttcgggtgaaggatagctgtccgggtccagcaggctggcatgccaataaccgtcttttccttgcagtccggcgaggcgctcggacatctctttataaagttcgagatagaaaggacggaattcggtatcttccgccggcagcgtcttcaggatttccgccagcccaccgattacccaaccgttgccacgtccccagaaaatcttcttgccgttggcttctttctgtccgatgtatcggctgtcgcgatagaaaaggtcttcgtctttatcatacaggtgattgtaggtagcacggaattcactgtcggcgaagtgcatgtatttacggttgccggtcagcgtgtagagtcgtgtgtagactccgggcgccatgaaaagggcgtcgcaccacgtccagcgttcgatcgtgctgcctttgctgtaatcgagatccatgcttccgttggaaggattgttcaacacccagtcggcgcgggcgatggtcggtttcagcatattctcgttcttttccttattatagaaatcgatgtaggtttgtgcgatgcaaacgtcatcggcatgatacatccggttggcaacctgccagctctgtcggttgaagattttccggagccagtcataatatgtattgtctccacttagttccgcccagtcgaacatccccatataaagtgctccggcgatccatccgcgcggttcgctcttggcatatttgttttcgggataatctttgatctgccagtccgccacccgccgggcaacttccatgatgctttgccggtccaagcccgtttccgtcgcactgacagcggctgtatttgtcgtttcggcctgtgccggcagattgttcactaaacaggtacaagcgcaaagtgagaggcctgtacagatgtacttgattgtagttttcatgatattcgttctgtttcttttaattctgcaccaaaaataggaaagataaggctcaggatataataatatcatctcaaaatgagtaaaaaatgtaccaaattttatgattattaaaaagaaaggggatgtccctttggctggaacttcccctttcatcctataagtgtgtttttactttatagctattcaatgcttagtatcccggattctgtggaaattcggctcctgtgttagagtcgatgatggtctgcgggatcggccacaaggtgtgatgttcatccatagtgttgctgtgcgggttgtatttctttacgcgttcaaccagcttgcctgtacgaaccaacgtaaatcggcgtaactcttcaccaaccaattcacggatacgttcgtctagtaggaagtcaattgtggcatctttagctgtaatttccggtgcattggctcgtttgcgtattacattgatcgcgtctgcggctccttgtgcattgttttgcatcaagcgtgcttcagccaatagcagatatgtttcggcaagacggaacttcatacggtctttattgttaccgccatagctcaaatcctctgcttttccgtagaagaatttcgtgacagccgggtatatggtgaattttgtccatgtctcttctgtgatttcggctttctttccatatttatcagaagaagtatcgttgtaataccagtttctcttgatgttatattccgagttacgaatatcgcttgaagcgaagaagtcgttgctgtcgatccaccatttgaatgggacgatctgtgccaaaccacgcccgcctaaagagtctgccaacacaaagccgtcttcgttgtagtatttgggaacccaagcacgttttgtccagtcttcgtttgctccgccgcctccggtcgtgttgtattcgagttgcataacccagatgctttccatattaccggaagtacggttctggttatattctttgaacatatcggagaacggatctccggctttgtctttctccgcaccgaagcgtgaagtcatcagatggaagtaaccgcaatcgattacagcttttgctgctgtttccgcttctgcatacttgcctgccatgaggtatacttccgaaagcatatgctgggcagcccattttgttaactgtccaacttcgaccttatcgggatcttccggaagatttgcgattgcaaactgcaagtcttcgatcatcttgcctaaaacttccgctttcggtgtgcgggtaaagtctatccggaagtctttttcaattttatcaacatatggaacatctccgtacaaatataccagataccgataagcataagcgcggaagaagcgagcgatagcctgatagtaggctttatcggtcggtttgtcccaatttacattaccttccgaatattcgaggatttcattggcagaggcgatcaaaccgtatccccagttccaataggaagtgacaaatgttgtggatggtgtataagacaagttttcgaaaggaaccaatgaaccgtctccatgccctgtgtagacaatgtctgttgctacctgaaatgattcgtacggacaagcttgtccctggcttgttgttgctcctccccatgtgttaaattcggaacgggcccaaccgtacaacccgtttactccgacttcgaaaccatagctgcttgtgtatgtattgtctggagatagcgagctttttagctcttcatccagaaaacctgaacaaccggttgatgtcaccaataagaatgcagcagcggcagttgctaatatatttttcatatccaaattcaattatattataatgttagaaagtaagatttaatccaaacatgtaagaacgggctgtcgggtaggtaacgagaacatttctgttagcatcgctatcttctaagttcagccagttgtcgatgttactgaaagtatagaggttgttgacacttgcattgatactcagcgagctgattccaattgcacttaatgtagtcttcgggaacgtgtatccgatcgtgatgttcttgatattgacgtaattcatttttttgtagaatgaatgtttatcgtaaggaacataagcaggagatgtcatttcgtttgtcggattttccggtgtccagtagtccataccgcttatgtagttgtatgtcggcatccagcggtcgaagttgtagtcatgtaattcttttgtctgcccgaatactccgttcagcaagaaagagaagtagatgtttttgtaatcgaagcggttacccattgacagcaggaagctgggcagtttggaaccgatgattttcttatcatcggctgtgatagagccgtttccgtctttgtcttccagtttagcagaaccggggacagcgcctttctggtattcttttccttcttcattcaggaacttgccgctttcggcatcccagctgatcgtgtgtccgttttcaacatatgtttcgttttcctgccatgtcccaacgacattgtaatcgtagaatacgcgcagcggttctccgatgaaccatttgtttgtgatatcgtctttgccatcaccgcgcagttcgataattttgtcgcggttcagcgagaaattgacgtttgtggtccaacggaaatcattgttttggaagttgacggagttcaatgcgatttcaacacccttgttacgggttttacctacgttgtccataatggatttgtaaccgttcatgtaaggaactgtacggctcatcaacaagtcgcttgtgttgaccacatacatgtcaatgttaccagaaagacgtccgttgaagaaactgaagtcgatacctgcattgatcgtgcgtgaggtttcccatctcaggtttgggttcccaacaccgtttgtaggcaggtaagctccgtttacaaccgttccgttgtcgccccaaatgtagttggtcagtgtcaaacggtcaagcgtctgataaggattgatggcctggttaccgtttgaaccccatgaaagacggattttcagcatgtccaaataatttgtctggctttccataaactcttcggaagagatattccatgctgcggcaacggaagggaagaatgcatatttgttgttctttccaaatgcggagtaaccatcggaacgtcctgtcagtgtcaacaaatacttgttggcgtatgaatagttcaaacgtaacatataagatagcattgccgtttctgtcagtttggatgtgatttctttatttttctcggcaccagccatattgtggtattcggaatcgtcgtttacaaaactttcgcctgattcttttgcttcctttttggttgtttcctgcatactgaacaaggcggtggcatcaattttatgcaaaccgaatgtcttattatatttcaagagattttcccatgtgtaatcataatagtggatattctctatagaagcggaaccattcacctttttacccgaaagagtatttcttccgtaataagatcctacaaaattattgcggtagttgtaaccgaagtttgtacggaatgacagaccgtcaatcgggaattgaatttctgcaaaagttgaaatgaatacattacgatttgttttgtcgttcgtcgcatcaatattggccattggattgtagaacaaagtttggtccattggatagtcgacgtaacgatcattttcatctttataaatgccataaggactcattttcaacccagcctccaaataaggttgctctccgccgaattctttttggatcgcttgcgttcccattccgacagttaaccatttatttaaaacctgtgtaatgttcaatgcgatgttagtacgttttaaacctgtgttttccataacgccatcttctcttaagtgagagattgatgccatataggttgtagcttccgtccctccggaaatgctgatctgatgactggtggttaaagcattacggaacatgatgtcttgccagtccaactcagaaccgttctgatagttcgcacgttcactcggattcaaaagtacaagcggatcgagttgatctccagaataaccgtatttcatgcggttgtagtcttgtgtgtattttacatattcggctcctttcatcatatcgatacgatgttgtgcttgttgcatgccgacttgtcctttatatgagactgttggtgctccttttttaccttttttggtctgaatcaggattacgccgtttgcaccgcgtgaaccgtaaatggcagctgaagatgcatctttcaatacagacatattctcgatgatatccggatcaatgtcacctaaagatccgctgtaagggataccgtccatgacgatcagcggagaattgtccgcactcaacgaattttcaccgcggacacgcaaagactggtcttcaccaggtttggcgttgctggttgtcacgttcataccagggatttgtccggccaatttatccatcaaattgtttgtcgtaaccatctggagtttttcttcgccaacagccacgataccgcccgtcaagtctgatttgcgttgcgaaccgtaaccgataacgacaacgtcgtccaaaccgatcgcattgtcttttagaacaatgttcaatgtttttgctcctgtaatcttgatttcttgcgtttcacaaccgatgtaagagatagcgattgtcgagttctggggaacgtcaagggagaaattaccatctatatcggtaacagtaccgatcgtcgtaccctttacaacaatgttagccccgataatcggaaatttgtcagcttccgcgataactgtaccggaaactttgacgtcctgcgcatatacctgtacggatataaacgccataaagagtaataataaggaaagaaatcgattcttcccgtttgccttttcattgggaggcaaattccctcgtagttgtctgttcatgcctttcataatttattagcacattaaacaattaataattaacttgtcgattctatttgttttttatgtcaaaagaatgaaagatgcaagccaagcacgtgtatttttattccaaaaggggataaaaatataccaacgtgctaaaaaacatttattttgatgaattttgatagatgcattcttagtcttgagattttgtttcctgatattctgtcggtgacattccatagacagccttgaagctgcgggcgaaatacgaacggctactaaaaccgatgtgctgggctatttcggaaatattcatgtccgattcctttaaaagttttgcacctgcctccagacggatatttttaatcaactcgatgggagaaagtccggttacggtctttactttcctgtaaaagttagtccggctcattcccaatgcctcataaatgactgatacatcaagttcgggattcgatatattggcttttacaatctcaatataccgagtgaggaaatcatcgtgctcttttggctcttctactccaaactgtttgagggaaaatgtttccccatacatcgtcttcattttctcgcgtagggaaaggaggttccggatacgggctttgagtaaagatatctggaaaggcttgacgatatagtcgtctgcgccggcatctaggccttcctcgatctgtgatatcattgacttggcggtaagcaagataaccggtatatggcagtagttctggttttctttgatacgtttacaaagttcgagcccgttcatttctggcatcatgatgtcgctgatgacaatatggggatatgactcctcaatcatcgccaatgcctctttgccattgaaagccttaaccacgatataatcgaggctgagctgttgttccagatattgaagcacttcctgattgtcatcggccagcaaaaccgtctgcttatttttgttctgggtctcttcgaccagcaaatcgaactttttactgatttcggcggacttggataggacgggagattcgttctccccttcttcctgtttttcggtgtcgggaagaaggaacataaagcgggtgccttccgtttccgaactttcggtccagatgcaaccgttatgctgcaaaatgatggagcgtgtcaagctgagcccgatacctgtaccggaaatctgccggtgtatatcttcttgtgaacgatagaaaggttcgaaaatcttttctgcttcctgttcgctgaaaccttttccggtgtctatcacctcgataaacaggtatccagcttctaccaggatggagctgtattgagctgggaaatgggggagcagttcacattccgcctgtgtgaccgtgttgacacggatggtcacctgtccttccgaaggtgtaaatttgaaggcattggagagcaggttgaagaataccttttcgatctccgcttcgtcaaaacaaaccttatatgtttccggtagctcgttgtccaacacgaaacggatctcccggttgtcagccacgctctcgaaagagtgatacatctcgcggataaaggaggaaaaattaaaactggtcttttgtaggactgttttgcccgcttcgtatttttgtatatccatcagattattgactaagagcaacatccgtccggtattctttttgatcaactgaagtgtctcctttatttcaggcgagaaagatacgtactgcatcaggtcgtttagcgggttaatgatgagcgtcaggggagtacgcagttcatgagagaaattggtgaacatgcgcatccgttcctcatgcaattcgttgaccttatcctgctccatctgtttgtagcgaagttcccgttcccgttcgtgtttatcgtgctgatgacgaatgattctcacgatgatgaatgtgattatacaaaagtataagaggtaagcccaccaagtcttgtagaaaggcggatcgattgtgatgcgtagtgttgcttcttcgggattccatatgttgtcgttgtttgaggctttgatccggaatgtataggtgccgggagccaagttgctgtaataagcctcccgtcggtttccgaccatgtgccatgccggatcggctccttccagcttgtaggcatactggttccgttcggaatggataaagtttaacgccgtgtatctgaacgtgatgttattctgatcggaagtgagcgtaatctccccgtcctcaatgtttccagtcacgtcgtctttattatttacaatcagggaagtgatatctactggcggaatgttgggattcaccatgatcttgtccggattgaagaaaaggacccctttgtctccggggaaatagatgctgccgtcggcagaaatgctgttgcctgaaaatcgtgtaaactccattgccggagtatcggctattctcatttcactgaaagtatcggttgtgcgattcagtttatatatggattttcctgtcgttacccagatattttggtgttggtcgattgtaagtgagttaatatagctgtcggacagcccgtcctttttctgatagtgtttggccaatttcaggttccggttcaggcggtataagccgtttttattggtcgcaatccagacgtagtcttcgttgtcctgcgtaatggtcgtgatatttcccaacttttcgaatttgggatccggttgcagttcggtggaaaggttgcggacggtttctttcttcatgtcgtacaggtaaaggctgtcagacaatgtaccgaacaaaaacagctctggttcaagttcatggataacagtaacccatttgaaagagcgggaaatgccgttggccatgaaccggttggtttgctttcccttgtcgaccatcactaagttctggctgctgtttgtcggtatccagagccgtttgcttttatcgatgtatagggagaaaatgtcgttgtgctggaagtcgtatagctttttatactgtttatcccgaatggaaaacaaatagactgacccgaaatgggtagagcacaagatcgagtctccttgtatcaggatcgatttgatgatattaatctcataattcccttcgtgaagaggtttgatgggataaagctgttgtcgcccgttttccgggttatagtaaaacaatcctgcaccttctgttgcaaaccacatgttcccgtccttgtcttgttgacctttgccgatgatgccggcatattcgtttggcgtgatataggaaaccggcctgtaaaagggactatgataattgactcctgctgaataggtcccgatccagagtgtctgatccttgtcgatcagcatgctgtggatggagtagtggctcaggcctcctttcccggcgatactgatattggcaggagtgatggtgagttcttttttattcagtatgtttaatccccggaatgttccgaccagaatggaactgtcgccataggaaacgaatgtgcgtatcgagttgttattgaggttggtgttatccttgtgcaaccatgtaaaggtctgtttgtttttgttgaagaggcaaattccggtttcgtctagtcccagccatatatccccgttgttgtccggtaatatggttgcaatgataccgtcgatgggtacgtgtttttttagtttccagttttcggaataaatgtacaagccgttgctctccgttccgatataaatgtccttgtccggagcctgtgctacggaataggtcggtgaagggattgctatgtcggggaagatcgtttcgaccgtctggttcatactgcatttgaatacggatcggttgcagaaagcatagacattcccgtccgaatgttttaataggcggttgatgatattggtggtgcattccttgttgatgcttttggggtaaaaacgggttatctttttggttttataatcgatacagttgatcccgttcgaagttgcgatccaaatattcttccggttgtcctcggcaaatccccgaatgtagttgtctgttaatgttgcattattgttgacttcgttttgatagacaacgaattcgtagccatcgtagcggttcgcgccgttgcgcgtcccgaaccagatgtaaccgtccgaatcctggaaaatatcaagaacggaaacttgcgacaggccatcttctactcccaggtgggagaagaagaaatttatgctatatacaggaggtgcatatagcataaccataatatatatagtgaatgcggtatagaatctttttatcatccgtagtttcatggtttatgagtaaagacgcatgactgtatatcttttataccgcaaagatagtgatttggagacgatcttgaacaggattgagatgattttacacggttaaacaagttgataaacctatttttgtaactcaatcaattaaaacatcatgaataaacgagtattgagtttaaccttgttgctggtctgtttcagtttggtgatgcaggccgaaggccggattgtcgagccgtttaattccggttgggtatttaagaaagcgccggcaggtaaggaactggccgttaatgcgccgaaatgggagagtggatggaccgaggtcgagattcctcacacgtggaatgcaaaagatatgcagacgcagtatgaccaattctacgaaggacctgcctactacaaaaagcactatttctttcctgctgaactgaaggacaaacgcgtcttcctgcgtttcgaaggtgtgggagctgttgcggaggtgtatgtgaacggttctcttgtgacaactcataaaggagcctactctgctttttcatgcgagatcggtacggcgctgaaaccgggggcggataacgagatcatagtgaaagccgacaatgcgtcacgtccggacgtgattcctatcaatcatgtgcttttcggcgtttatggcgggatgtaccgtccggtttggttgatcgtgacagagccttataatatctgcgtgaccgattgtgcttcttccggtgtctacatcacccagaagaatgtttccaaaaagcaagcggatgtaaaagtgaaagtgaagttggataatggaacgttgcaaccggctccgctcaccttacagaatacgatttatgatcaagaagggaaacaggtagcaacccagagccgctcgtttgacctgacaccgcagggcgtacagtcgttcgaagccgatttcaagatcaagaatcctacattgtggcaagggcggaagaatccttatttatataagatcgtgagtcgcctgatccggaatgggaaagtgatagatgaagtggtacagcccttaggcttgcgcaaatacgagattgttgcaggcgaagggttctatctgaatggcgagaagtatccgatgtacggtgttacccgccatcaggactggtgggggctgggtagtgcgttgaagaatgaaaatcatgacttcgacctggctactattatggatatcggtgcgacaaccgtccgttttgctcattatcagcaatcagattacctttattcgcgttgtgacagcttaggattgatcatttgggcggagattcctttcgtgaaccgtgtctccggacaggaagccgagaacgcccgtaaccaactccgcgaactgatccgccagagcttcaaccatccgtccatctatgtttgggggctacataacgaagtctatcatccgcacgaatatacaaaagaattgacccgatccttgcatgatcttgcgaagacggaagaccccgaccgttacactgtttcggtaaatggctacgggcacatggagcatccggtcaacttgaatgctgacatacagggaatgaatcgttatttcggctggtacgaaaagaaattgcaggatatcgaaccttgggtagaaggcttggaaaagaactatccggatcagaaattgatgctgacggagtatggagccgacgccaacattgtccatcagaccgaatatctggacaattcactgaattggacgaaacctttctatccggaaacttttcagacgaagacacacgaataccagtggagcgtgatcgccaagcatccgtatattgtcgcttcttatttgtggaacactttcgattttgccactccgctggctaatcgcggcgatcttcccgcccgtaacatgaagggcatggtcacttttgaccgcaagacgaagaaagactcttatttctggtacaaggcgaactggagtgaagatcctgtcttgtacttgacacagcgccggaatgtggatcgcgaaaagaaagtcacttctatcaccgtttattctaatatcggagaacctaaagttttcttgaacggccaagagttgtccggtatccataaaggttatacagatgtacattatattatagacaatgtcaccttggcagacggaaagaacattgtgaagaccgttgcaagcaaagacggcaagacatacgaagacactatcgaatggatgtataccggagagaaaaaacgggaagcggattccttttccatcaaaggtgtacatgcagggtttgaataaaaaacaacatactaattaaatatagctgaccttgactataaaagccactaaagcttatctggatcgtgtagctttagtggctttttgcaaaaaaacaaaatcgccagtaaaatatttccttatacaaggagttatattaattcatttcgctatttttgcaagaaaccgtatcagagatagcagatgggtaaaggaacaaaaagcatagccttttatttgatgatgatcctggtctttggctcactcatgtatttcatagtcaaagaaggagaaagccagcaggtcggaacagccgttcagaccatgcaaaatgctccccaaactatgggggagggatttcttgtgttctgggattcggttactcaccatatccagtcgtcgatgggaatccttcttctgcaaattattaccatattaattgtctgccgcttgttcggttggatgtttcaaaagatcggccaacccaccgtcatcggtgaaatcgtagccggtatcgtactcggtccgtctgtgctcggccatcttttgccgggggtatctgcgtttctttttccactcgagtcattaggtaatatcaccatattaagccaattcggtcttatccttttcatgtttgccatcggtatggaactggatatcggcgaagttcgtaaaaaattgaaggaaactatcctgatcagccataccagtacggtcgtgccgtttttcttcggtatgctgactgcttattatgtctatggatcttatgctcataaaggaacaccattcctgtcgttcgctctatttatcgggatcgccatgagtatcacggcatttcccgttttggcccggattatccaggaaaaagggttgaccaaaacacatttgggaactatctcattggcaagtgctgccaacggagacattactgcctggtgcctgttggccgtcgtgattgccatcgctcaggcgggtagtatgctgagtgccgtttacaatatattattctccattctgtacattctttttatgtttcttgctgttcgtcctttcttacggatgatcgggcatatataccataataaagaagtgattgacaaagcactggtggccctgatgttcctgctactgatcgtatcctcctattttaccgagatattagggttgcatgctcttttcggcgcctttattgcaggcgtggtcatgccagggaacatcaaattccgcaagatcatgacggaaaaggtggaagacgtatcattggcgctcttcctgccgctttttttcgtttcgaccggactgcgtacggagatcggtctgctgaacacaccggaactttgggtcatgtgtggaatcttcatcgtagtggctattatcggtaagttcgggggtgctttgttttccgctcgttttgtcggtgaaagctggaaagacagtttttacattggggctttaatgaatacacgcggtctgatggagctggtcgtgttgacgatcggttatgagatgaagatattgccgccttctattttcgtcatgttggttttgatgaccctggtcacgacctttatgacaatcccgttggtttctttcattaaattgtgtttcaagacacgtgaaaagattaaggaacatcaggtttgtgtggaaccggccgacgggatatttaaggttctcctttcattcggacgtgccggaaatggacagattatgcttgatgtggctcaccagatgtttgcccgtggaaagaacaaactggatttgacggcgctacacctgaccgtcgggtccgatgtcaatccgttacatacggataattttgaggaagtgagtttcggaccgatcttgtatggagccaaaaaattaggtatgcacatccatacacgctatgaggtttcgaataacgccggacaggatatttgcgacatcgtcaataacgaaggatttgacttcctgctggtcggttccggcatctcgatgagcgactcgccggacgatatcgcggctacccgttaccgtacttccttctataaccgttatttcaagcgcttcaaagctcccgaatcctggttttatcctggtgcgttgctgaaagataagactaagatgtttattgcccgcagtaattgcgacgtcggtgtatttattaaccgaaatttcgtgaaggccaccaatacgttggtggttatcagttccgaagaagatctctttctgctcgactacacaaggacattgctgaaagcgactcacggttctgtcggtattgtagccaagatgtccaccacaacacccggacatgatcaaattctcaaagaactttgggatttcgtctcgtccaccccacaaacccagctgttaccggataaagacctgacgccgggattgttcaatagctataacttcatgctgatcggctacaacacttggaatgacgtatccgaacaccgtaaagaggcccttcaaaagatgccgtcaacattgattttgaacaagaacaaacggagttcttcggataattgatttaagcctatgcatttgcaacggactttttatttatatgtgagttttttcttctatctttgtgcgaaaccaatctcaaaaaatcatggagtcgctaaatctaataaagaatgacccttggctggccccctataaggaggcaatagaaggacggtaccaatacgtggtaaacaaagagaagaacctgaccggtaacggcagacagacgttgtcggaaatggcttccgggtatctctacttcggattgcataagacaaagagtggatgggtttttcgtgagtgggcacccaatgctactgctatatatatgattgggactttcaacgaatggaagaaggacgatcggtataagttgcaacggttgggcaatggcatttgggagattgcgcttgctgaaggtttgctgcgtcatgaagacctgttcaaactcctagtcgagtgggaaggaggctgcggggaacgtattcctgcatggatacggcgtgtcgttcaggatgaaaataccaaaattttcagcgcgcaagtatggaatccggagaaaccttatgtgttcaagcataaacggtttaagcctaatgtctctccattgctgatttatgaatgtcatatcggtatggcttcgaatgaagagaaagtcggcagttacgacgaattccgtcgtatggtgctgccccgtattgcgaaggaaggatataatgccattcagattatggctatccaggaacatccttattatggttcgttcggttatcatgtcagcagtttttttgccgcatcttcccgttttggtacgccggaagaactgaaacagttgatagacgaggctcatagtatggggattgctgtgattatggatatcgtacatagtcatgctgtcaagaacgaagtagaaggcctcggacgtttcgatggatcttacacgcaatattttctgggcggtgcccgtcgcgagcatccggcatgggattccctttgtttcgactatggaaagaatgaagtgcttcattttttgttgtcgaactgcaaattctggctggacgagtataaattcgacggtttccgttttgatggcgtgacctcgatgctttattacagtcacggactgggcgaagcattttgtaattatgctgattattttaacggtcatcaggatggtgatgctattgcgtatctgacgttggctaataagcttatccatgaagtcaataagaatgcgattacgattgccgaagaagtaagcggaatgcccggattggctaccaaatatgaagatggcggttatggcttcgactaccgtatggcaatgaatatccccgattactggatcaagacgatcaaggaaaagaaagacgaagactggcatccttcttccatctggtgggagacgacgaaccgccgtgctgacgaaaagacaatcagctatgcggaaagtcatgaccaggcgttggtgggtgacaagacgatcattttccgtcttatcgatgccgacatgtattggcatatgcagaaagatgatcacaattttatggtggaacggggtgtagctttgcataaaatgatccgtctggtcacggcctccaccatcaacggcggttatctgaactttatggggaatgaatttggccatccggaatggatcgatttcccgcgtgaaggaaatggctggtcgcataagtatgcacgccgccaatgggatttggtcgataatatggatttgaaatatcatttcttaggcgatttcgatcgtgaaatgttggaattgatccgtagcgtgaagaacttccagtccactccgatacagaaagtctgggataacgatgaggatcagattttggcttatatgcgaaaagacttggtgttcgtattcaatttcaatccgacaaaatcgtttgccgattacggtttccttgtgcctaagggtgaatatgaggtggttctgaataccgatgctaaccgattcggtggcttcgggctcgcggatgataccattcatcatttcacgcaattcgatccattgtataaaaaagagaaaaaagaatggctcaaattatacattccggcacgcagcgctgttgtattgaagaaagtaaagaaagcgaaataatttgtgatttataatttatgatttgtggtcaatgcgtaaatcataaatcataaattataaatctgataaatcaaaaatcaaatatgttatatccaatgacatttaagcctatcctcaagaagattatctggggaggctctgacatttgcccgtttaagggcatcactccggtgcaggaaggtattggcgaaagttgggaactttcacatgtagagggcaattattctgttgtagataatggtgcacttgaaggtaaaacgctagatgaactgatccgtacatatggcaagcaactgttaggggaaaaggtggtcgaacaatttggttccatattccctttgttgatcaagtttatcgatgcacgtgataatttgtctattcaggttcatccggatgatgaattggcaaagaaacgccataattcttttggcaagacagaaatgtggtatgtgatcaatgcagccaaaggtgccggcttatattcaggcttttcaaagcagatcaatgcggatgaatacgtgaaacgtgtcgaggataatacgatcatggatgtgttacaacgatacgaggtgaatcctggcgatgtattcttcctgcccgcgggccgtgtacacgctatcggagccggttgctttattgctgaaatccagcagacgagcaatatcacctatcgtatatatgattatgaccgtaagggaccggatggcaaagggcgtgaattgcataccgaactggcaaaggatgcgatcgactataccttgtatccggactaccgcacccattacaaagcgcatacgaatgcgactgtagagcttgcagcctgcaagtattttacaacgaatttgctggatgtcgatacgatcatggttcgtgatttctccgaactggattctttcgtcgtttatatttgtatggagggtaaagcttctatccgtgacaataaaggcaatgaaatttatattcaccaaggacaaacggtcctgattccggcagatacggatgtcgtgacgatttcaccggttccgggtgccaaatttatggagacgtatattggataagacccatagggttacgccctttaaccttatgggttaggaggcgtaatgcatagggttatggaatagatagaatgccgcaggtttttccggattatccggagacctgcggcatttgtttttattcgattgtcaactctaatctctctaaggctttttcgtctgatgaaccgccgtaaagtatctgatattttccgggacggacttccatcgtttgtgtattgtcgttaaaagagtggaatgcttcgggtgtcagctcgatgttgacttcctggctgtcgccagcttttacgtgtacacgcaagaaagccttcagcgctttgatcggcccttccggatcgttcggatttttgatgtagatttgtgcgacttcgtcaccatccattttgccggtgttggcaatgtcgaacgtcagtgtgacagattggtctttggtaatcttgccagaagacagcttcgcattccgataggcaaagttcgtgtagctcaagccgtatccgaacggataaagtggtgtttcggtcatataacggtaggtacgacctttcatgctgtaatcttcaaagtccggcaactggtcgatcgatttatagaatgtgactggcaagcgacctgacggattgtagtcgccaaacaggatgtcggcaaccgctgtcccggcttcttgtccgccataccaggcattcagaatggcgtcgatgttggcgtcttcccagtttaaagccagggcactacccgtacaaagcacgtagacaaccggtttacccgttgctttcagtgcttttaccatttcttgttgtactttcggtatctcgatattggtgcggtctcctttcttgaaaccttccacgttgaccggcatttcttcaccttccaagcgaggcgaaatacctccgacatagacaatcacatctgcatctttgactttagcggcagtggcggcataatcgacaggtcgacgcgtaccgatctggaagttgaggtcagcgctacccgtgcgttgcatatattcgatcttgacaggatatttctttcctttttccgcattcagcatatacgtcttttctgccccgtattcgttttcccaaacttcggctactttttcatctccgataaagaggcggaaggcgtcgtttcctgacaacttgatctcaacctgttccgtctctggtgcttcaaactcgccggtaaaacgtgctgtgaagtttgtcaggtttacattcggtgcgaactgcgtgtttccgcctgtcgtataatgtaattggcttgctaaacctttataaacggcttctcccttgaattccgtattgttgtagaattcggaggcgaatccctgtccggcaggggaggtgatgtggttgcccaagtcttgtattacgaagtcagccgcatgattacatcctaattcgtagattacttctgtatcgggcactttgttgcggataccttccaatattgttacggtatgcgtcgggaagccgttgtagttcgcccaaagcatggtcgagtcggcggcattcggaccgacaactgcaattttccggatcgttttactcagtggaagtgtgttattcttgttcttcagcagcaccatactcttatgcgccatttcgagtgcttgtgccacatgttcggggctttccaccacgttgtatgggatttgagcataaggaacccgctcgtccggatcgaacatgcctaattcaaaacgacctttcagcaggcggcgtagggagacatccagatcattttcggatatctttccctccttcaaagctttgatcaaagctttatagctgttgccgcattccaggtcagtcccgttcaggacagcatctgcagaagcgctttccgcatcgggatgtgtttcgtggcgaggcgtgcgttcgtcccgttgccagaagtcgttgatcgcaccgcagtcggaaaggatgatgttttcatatccccaactattccgaaggatgtcgatgagcagtttgtcgctactacagcagggtttgccttgatagcgattgtaggcgcacatgacttcctgtacatttcctttttttaccaaagcctcgaaagctggcaggtaggtttgccataaatcacggggcgtcactgtgacgtcaaattcgtgacggttccattccggtccgctatggactgcataatgcttggcgcaagcatgtgtcttaaagtatttcggatcgtctccctgcaagcctttcactacggcaacccccatccgttctgtcaagtacggatcttctccataggtttccatgccacggccccagcggggatcacggaagatattgatattcggcgtccaaaaggtcaagcctttgtagcggtcatattctttatttttttgatactgatggtatttggcgcgagcttcgtcgctcaccatcgtaaatgtttcgtacagtgcgtcgtcgtcgaaagtagccgccatcgcgatagcctgtgggaaaacagtcgcttttccggcacgtgcgacaccgtgcaaggcttcgttccaccaatcgtattcgggtataccgaggcgttcgattgccggagtcgtattcatcatttgcccgatcttctcttcggcagtcagacgtttcaagaggtcgtctatgcgttcgtcgatagggagatcaggattgcgaaacggataatcttcttgtctttggctacaagaaacagacagcaataatgttagtgctgctaccgtcagatgtttcattctcatgttattaaattttagatattgtatgctttacgttttatcttattgtaagatgtttgttattagccatttattatgataaattatattgcaaagctaatggtttacttgcatttcttcaagtagaattacttaaaataggttacttcgtccgttattttagcaaatgtcctatttttgtaagatcgaataataaaaagaaagagagatgaagaaatttttaagtgtgcttttgatggtggcaggtcttatgtcttgtggagatgatgataagccgtttattcctgagttgaacaagctgacgagtgttacatgtacgaaaaacggaaatgctttttttaacgcgaatatcacttatgaccaggacaagcaaatcaatcggattatattaaatacggaaggaaatcagtttactgataattatattattgtagacaagacgatttccgtaagtggcgtgaagatgatcgatggttctccgactaatccctttgtccatacagtttacacgctaagcggaaatatgattgcggccaaggaagaaaaatctgaaaacaagtatatgagtaatgctgtgtatacggctgtagaaaacaggtacacctatagttctaattggctgaaatcagtttcgcagattatccagtggccgaatgaggacggttcgggttatcagatcagtttcgcagattatccagtggccgaatgaggacggttcgggttatcagataagagaactaggtgaggtggatcgctattcgtgggaaaatggaaatgcggtgcattatgcttatctgccacagaaagagattacatatgaatataattctcaattacgtccagagaactttccgttccgagttgtcaattcatttcaaccggtcggctttgatgtgatttctccgttgaacctgctctatgggaagatgaatcagaatctgccaacccgtgcctattggtataatgtctccgatgcaacggatatttgtgccgaatatacattccgctatacgttgaccggcgattatatcacaggcatgacgattgaagaaaagatcaatcccgtgaatggtgcaactgcggaaaataacacgtatgaatatgagtttatctataatttcgtggtagagcagaagtaggacaatttacttcaataaatcggggcgtagccgggctgtcctttcttgagcttgcccgagacgccattcttcaattttgcgttggtgcccggacagaaggacgtcgggaactttccagccgttgtaatcggcaggccgggtatagactgggggagctagcaaattatcctggaacgagtcggagagggcactttgctcgtcgccgattgctccgggaataagacgtacgacggcatctgtgatgatggcggcagccaactcgcctcctgtcaggacataatcaccaacagatatttcctttgttatcagatgttcgcggatgcggtagtcgattcctttgtaatgtccgcaaaggatgatcagattgttcagcatcgacatgctgtttgccatcggctggttgaaggtttccccatctggcgatgtgtaaataacttcatcataatccctttcgcttttcaaagccgagatggcccggtcgataggttcgatctgcataaccatgccggcttcacccccgaaaggataatcatccacacgccgccatttgttggtcgtgtaatcccgcagattgtgtaaatgtatttcagccaaacctttgtcttgtgcccgtttcacaatggaacagtttaccattccttcgatcatctcgggaagtacggtcagtatatcaatgcgcatcatattttatttcagatttatggtgcaaatgtaggagatttcccaaagtctgcaaaataaagttttgtaagcatggatttttagttttttgcaaaacaactatcatactatcataaatgaatttatatgcttgtaaaacagtgtgttattctatgatagttcttgcttttaactatcatttatctatcataactatcatgggtaaaagtgataatgtgttatatatcaatattttattaaatgtcagatgtgttctgaagctgatacaaaatagattaaagaggctcgttttttcatgaagacaagctacttttttggtgaaaacaacttgaaaagtttcttcagacccgggtggaagggtatgggagatccgggtgtggaggaggtggagacccgggtctacgtgaaaccgaaacggggatgtggagctgtttatctgccttgtttgaggagattttatgcactgtttctgattataatccagtggaatacctgctttttaaacacaaacagttccttatacttgtagatggccattatgaatcaagaatgcataaataactattgtcaatgatatttgatcacggttttggtgcggttgccctgaagaaactacttgaaactatcatatttgaataattatttgtacttttgtccgtcaatttggcgtaggccggacggccccgtctctttactgaataaattttaaagcgatgaatatatcttacaattggctgaaagattatcttgattttgatttacagcctgatgaagtagcagcagcacttacctctattggtttggaaaccggaggggtagaagaagttcaaaccatcaaaggtggattggaaggacttgtcatcggtgaagttcttacttgcgaagaacatccgaattccgatcacttgcacattacaaccgtgaatgttggcggcgcggaacccttgcagattgtttgtggtgcgccgaatgtagctgccggacagaaagtggttgttgctgtaaacggtactaaattgtatgatggtgatgagtgctttacgatcaagcgctctaaaatccgtggcgttgaatcgaacggtatgatttgtgctgaagatgaaatcggtattggaacagatcatgcaggtataatcgtactgccggccgatgcggtagtcggtactccggccaaagaatattataatgtgaagagcgattatgtgctggaagtcgatatcacgccgaaccgtgtggatgccacttctcatttcggtgtagctcgcgacctagccgcttacctgaaacagaacggtaagcctgccaacttgaaacgtccgagtgtggatgctttcaagattgatgatgaagttccggctatcgaagttgtcgttgaaaataaagaagcctgtctgcgctattcaggtattacgattaaaaatgtaactgtaaaggaaagtccggaatggttgcagaaccgtttgaaggtgatcggcctgcgtcccattaataacgtggtggatattacgaactatatcttgcacggcgtaggacagcctttgcactctttcgatgccgataagatcaaaggtaataaagtcgtggtacgctcggcgacggaaggtgccaagtttgtgacgctcgatggtgtggaacgtacgttgaccgaccgtgatctgatgatttgcaatgtggaagagccgatgtgtatcgccggtgtatttggcggactcgattccggtgtgacggaacagactaagaatgtattcctggaatcggccactttccatccgacttggatccgtaagacagcccgtcgcttcggtctgaatacggatgcttctttccgctatgaacgcggcttggatccgaatcagacggtcgaagtgatgaagcgtgccgctctgttgattcaggaagtggcaggcggaacgattacgggtgctatccaggatatttatccggttccggttgccccctatcgtgtggaactgacttacgataaggtcaatacattgatcggcaaggtgattccggttgaaacggtcaagagcattctggaaagcttggaaatgaagatcgtttccgaaactgccgaaggtttggtgattgatgtgcctgtatatcgtattgatgtacagcgcgatgtcgacgtgatcgaggatattctccgtatttacggatataataatgtggaattcagtgacaatgtaaagtctaatctgagctatcagactccgactgaccgcagttataaattgcagaacctgatttccgaacaactttgcggttgcggtttcaacgagatcctgaataactcgctgacacgctcggcctactatgacaatctttccacttacccggtttctcactgtgtgatgttgatgaatccgttgagtgcagatctgaattgcatgcgccagacgttgttgttcggaggcttggaaagtgttgaacataatgcgaaacgcaaaaatggcaatatccgcttcttcgaattcggaaattgctatgattacaatatcgaccataagaaggaaggtgaaacattagccgaattctcggaagattatcgtttgggcttgtgggtaagcggcagccgtgtggataacaactgggcgcatccgaatgaaaagtcttctgtttatgaattgaaggcatatgtggaaaacatcttggttcgtctcggtgtgaatttgcagaaggtcatttttggtaatctggctaacgatatctattcggcaggtttgagcattacgacttcgtccgggcgccagttaggtacgatgggtatcgtcagcccgaagatctgtaaggaattggatattgaaacggatgtctattatgcggaactttcctggacattgttgatgaaggaaatcaagaagagcaaggttaccttctctgaaatttccaagttcccggcagtgaaacgagatctagccctgttgttagagaagaatgttcaatttgccgaaatagaaaagatcgcaacggaaagtgaacgtaaactgttgaaagacgttgctttgtttgatgtatacgaaggaaagaatctgccggctggcaagaaatcatatgccgtcagcttctatttgcaggatgaaggaaagactttgaatgataagcagatcgatgctatcatgaaaaagatccagacaaatttggaacagaagttaggtgcacaattgagaggataaaaaacataaatcataaatcataagatcataaattatgggaagagcgtttgagtttcgtaaagcgagaaagtttaagcgttggggtaatatggcccgtgtatttactaagttgggtaaagaaattacgatagctgcaaaacaaggtggaccggaacctgaaaacaatccgcgtttgcgtgtattgatgcagactgctaaaaaagagaacatgccgaaagataatgtcgaacgtgctatcaagcgggctgtctctaaggattttaccgattataaagaaatgaactacgagggatatggtcctttcggtattgctatttttgtggaaactgcgacagacaatacgactcgtactgtagcaaatgtacgtagttatttcaacaagaacggtggttctttgggtacatccggcagtttggagttcctgttcgagcataaatgtgttttccatattgcaaaaaaggatggcatgtcgttggaagatcttgagttggagctgatagactatggagtcgatgaagtggatgaagatgaagacgaagtggttctctatggtgaatttgcccagaattcggctattcagaaatatctggaagagaatggatatgaaatcaccagtagcgaatttgtccgtattccgaacgatgtgaaagaagtgactcccgagcagcgtgaatcgattgaaaaattgattgaaaagttggaagaggacgaagacgttcagaatgtgttccacaatatgaaggaagacgaaaacggagacgaagaataagttcgtatttgttatagaataaaaaagagagtacaaggactataaccttgtactctcttttttattctatatcagtatttatatcaaaaaatcttcttttctttgctgtactttatttcaatacaaatacattttttagtggttatgaaaggttttagaactctactttgtgttatttcgttagccttatcaggcgtaattgtgagtgatgttatggcccagaaagaattgggtgtgtttaattctttggcagtaggtgtgggcgtcggtactaccggtatcgacgtgaatgtggcaactcccatcacatctcactttgatttacgtggtggtttttccattatgccaaatttcagcatgagtacggatgtagatgttgatgtggaagctatggaaggcgtgagtgttccctctacgattggtatggagggaagtatcaagcgtgtttccggtgaattacttgtgaattattatccgtttaaaaaaagttctttctttttgactgctggtgcttactttggcgggggaactttattaaaaataaatgggcatagtgatgaattgaaggaattggtagccgaagccggtaaggccggtgttgttatcggcgattatacgattccggtagacaaaaacggtaatgtgtcaggtggcttgaaagtttcgaatttccgtccgtatgtgggtttggggttcggccgtgccgtaccgaagaaacggcttggtgtaatgttcgagctgggagtccagttccacggcaaaccggatgtttatacggactatggtaatgtcaacaatttgttggatgaagtcgatccggacgatacgttttcgaaaatcatggataagctcactgtttatccggttatgaagatacgtctgtgtggacggattttctaatcgtacgtaaatatatatattaaatgaaagcctggctgtggggagtcaggctttcatttttactataaataagactgggttgtctttgtttgtcaggtcaggaaaagagtaggcaagttctttgccgcttttataataacagtaggtgttgctttgaaggtctatggattgaagttcgagaatcttgcctgtcttgtaaaagttgtcatccaatcctccttgcacgtgataggcttttgttcttcgttggtcgtaacaaaatgtatagctacgttccggtagagtaggatcgtagtgtgttgagattaaaaaacgtgtcccgatctgtaaagggagaatttttgcgtagtcctcagtgatggtcaactggttgctattgatgagatagagcgtgtcgtttaagatatgggctggctgtaaggatggcgcttgtacataaacgtgcccgttcttgacggctatttcggtacctgtcttgtaattgatatccattcttcccaaatcggcaacatccagtttgcgcttcccgacttcattaaagtagagatcaaatttatagagccattgttcgattgacggagcttgcttgttttctgaattaaccaagtctattgttgtccacagatggttgttataataagccatatgcccgaaagttttccatgaagcatcttgagggaggatactctgaaaaaggagttgcccgtcgtaatcataatagtatacctcatgtccggtgccgatcacgaccagccggtcgtggacaggatcgaccgcatagtcaaccagttcgactggctgtctcgttcctggcagatgtgccgttatttgtccgagaaattgaccggaactgttgaaatgataaagttgacgatcgctgacaaggaagatgtcttcccggtcgcgcttgatcattttaatcttgttcaaagaacaatgtccgtttgttttcaaagggatggcgatcacctcctcggcgacatcggacagacttccttccggttgacattgaggcaaatcggtagtatggatcacttgatatccgatccatccgtataaggctatcagacatatgaataaaagattaaaggtttttctcatttcatttctaattaaaaaattcctttgtataaacggacgatactgtcggtttattgcaaggatctcttaatcctgcaagaaaatccagttgttttcggaggagatatcttctctgtaccggaatccttcccaagtaaaatcttttaatgcatccggattggtaatccggtttttaacgatgtaacgggtcatttgtccacgtgccatcttggcgtagattacgattgtttcggctttcccgtttttccagactttaaaatccggtgttattacacggacagattgttctacctttttccagtcgaatgatggttgtaggtccatgctccccaggttgatcagtaggttatcgtcggctttcacttcttcaataagcggttctgtttgacgggcacgccagtaaatatacatattcccttctcctaattcgggcagtttcacatcatattccatccggtaaggtttgatcaggtccagcgggcgaaggagaccataacaaatggaaacgagccgcaaatgatcctgggcaaagcggaagtccgcctctgtaaaatctttgggattgatattcttgaatacgacacccgtataagccaataaagcttgtagcggttcttcttccgcagaatggaaattctgaaaacgatggtaactttccatcatcagcttgggactgagctttaacatcctgcctaattcttcggcgggatattgagccatgtgcaatgcgatctcgattgcttcctggttgaatcggggcgttgtacctgcaggcgcttttattttggatgttccagccattgtcttggcaggagataagatgatatgcatatttgtgaatatattgtttttattatgtaaatatctcgtcatttatatccggtgcataaataaaagtcggatatcccgcacccatttcctgatataactgcctgatatcacgatgcagactgctgatagcactactactattcctccgatctgcatcggttgcagatgctcgcctaagaaaaggacgcccatgcatacggcggtaagcggctccatgcatcccaagatcgcagtcgttgtcgaacctatataacgaatggccagtatcagtgtaaggtcggataccaacgtcgggaggaaagcaaccatcagcacgtctatcgttgtggccagattcggcatcgggtcgggaaaatctccttttatcgccagatttaccagaaagacaatcgctccggaaagcagaatatagaaagtggctttcaagctgtcgagcctggcgatccggcttcggttcatacctacgatgtaggctgcataggcaatcactgtagccaataccaacattaatccttttatattgatagaacctcccggcgtatttcctccgctcaacatatagacaccgcttaccgccatcgccattgccagcagtatcggcattgtcagcttgtccttgtaaaatacaaacatgatcaggctgactaccaccggataaaggaaatggatcgttgtcgccaccccgctcggaatataaagataagcctccgtcagccaaagcgccgtgatggcataaagtgtacctaaaataaaagcgatcccgaattcgcttttctgtatatcgaacggaatctttttcacccacatcagtacggcaaccagtacggatgctaaggaaaaacggtagaacagcaacgagtccaaacctacgccgttttcaagcgccggaatggaaaaaagaggaatcaatccgaatgtggcggatgcgataagtccgtacaaaaatccttttaccttcatgtaaattcactgtctgttgaaatgaggggacaaaagtagcaaatctttctgaaccttttctaatgaaatgggaatcatgctttgctattcttttcgattaattttgtatgtttacggcgtattagaaaatgatggacagctaattatgtccgggagcatgatgaataacccttgtttagggtgtgtggaaattaatacaaactttatattatatgaaaatcggaatcggtattttactattattctttgttacctctttgcaggcacagaacattataggaaaggtcatagacaataaaaaacaaccggtagatggtgcaaccatcgttttgcaggcaatagattctacttatataaacgcttctatttcaaatgtagacggaacttttgtgttggatagccagcctgaagaataccgcttgatcgtgcagcatctcttgtacaggactaaggaaatcgagggaaagggcagagatgtcggtgtcattcaacttgatccgcaggattatgctttggatgaggtcgtggtaaaagcggagcgtccttttgtgaaggtggaagaagggcgtttgggatatgatctgtccgttcttgccggcgacggggtggtgaacaatgcatacgaggctctgactaaactccccggtgtaaaagagactaaaggtgtattaactttggcaggtacgggaaatttgacagtcgtcttgaatggaaaaccgacaacaatggacgccggacaacttgagacgcttttgcgcaatactccgttggatagagtggaaaaggcggaagtcatgtacagtgcgcctcccgaatatcatgtaagataatttggatgatgaagatcattttaatctcgcttataccagcagttttacacctgagcagcatagcaatagcctgacttccggtaattatcaggcaagcaatgttgacaaatatgtcgaaacccgtatgcacaatgtcactttgcaatatcattccggatctggatttgatgtcggcggagattacacgcattatacgtcagataataaccaaactttgtttgcggattatgcggatggtgctcaaagcggtttctctataatcggtggtcaaaagatagaccgttattctatttatgttgaccggaagcgttctttggctaaagaatgggatttggggtacggtatgtcttaccgatttgcaaaagaccgtgactttcagacctatgataaggttacaggtgatatcccgaccgaaaatacggattcccggcttcgtgagcagactgccaatgtctatgtttccttgagcaagaactatgcgactggtacatcggtttctatctctgctacaggtgaatattataccatcggcaattatcgtaagtgggctgtctatccgcaagcatctttgacgtatgtaaaatcttccgaacatttattccagttttcgttatcgacggataagacttatccggggtattgggatatgcagtcttccgtcagtcatctgaacggatataccgagctttgggggacgccgggattgaaaccttcgacagcctataatttgaacggcaattatatatggaagcaaaagtatattttcggtctgttcttcatgcatacgtctgactttttcgtacagacgggctatcaatcgactgaccgtttggcattgatttataagaatacgaactggaactatatgcagatgtgggggacaaacgtcatcttaccctttaaagccggaaattggctggattcacgactcactttggtcggtatgcaagttcactagcgttgcgatgacttttttgatatcccgtttaaccggaggaaatggatgttcaacagttcgctggataacacgtttaaggtaggtaagaatctggctttcgaattgataggtagtatacaaaccccgatgatccaggggacttttgacattgaaacagtctataacctcactgccggattgaaatggagttttgctagcgataggataaatctgtctgctcgttgcagtgatcttttcaactcgggcatgcccaatttgaaagttcgttttaatgggcaacacttggatatgaacaacgatttttattcgcgctcttttaccatacatttcagctaccgcttcggtggatataagaagaaagaagccgggaagattgatacctcaaggttcggacattagtatgagccctgtttatcttttagggttgtgtgtcgaatgtacttgtttccgtctttatggatagcatactggacaagttacaatttgtccagtatgctatttattttttgtaaattatttctacatgagacaatttgccgggaaggcatttcatttcctatcagaccgtatattccatgcaacagaggttttacccggagagcgagccgttcgccctcttctgtcaggtaaatttgtttgttacgccggtccgtcgggtttcctcgacgttctacccagcctttcttttccagattattgataagattggtcaagcaagctttgtctttagctgtctgttctgccagatattgctggctgactccgggtttcttccataaacgatgcatcacctggagcatctcgaatgtcatgtcgacattattggttctcaatactctttgtatggtctggcgaaaggtcattcgcgttttcagaatttggagtattagttcgtgtgccgtttcgttatttgccattgctgtttacttttacggcacaaaaatagtgaatatccttgagatatcggttaaatgtttgattgtcgattaaagaatgcgccgttccaattcgtccaacatattcacgcgttccaaagaaaatgtgttgtcgtgcgtttgtatatattccaagattgtcttggctttttgcaacatcgcctgctcctcgtcgggatagagataactttcttcgatcagggtcttgacggctatctcaagacggaggattccgccgttgtcatcactgtcgagtcgacggacaagctcttcgggctgggccgtcataagggtaggacggtccagtttgagggaactgtatatggtttggatcaactctggagtatggcgagccgcatttgtgttgcgattcataatgatctgaaggactactttagcaagttcttcgatctgtatcatgatgaagtctctcttaagcataagaaatattagctttgaaaattgtcaattgtcaattgtcaattgaataatgcggatatcctttttagggcggtcatattcgtcgcgaggttgtccggcgatgatatcgagcacatcgaatccttcaatgagttcgccatatacggtatagttgccgtccagatggtgacaaccgccttctgtggtgtaggctttccgttgttctttggtgaacagcagatgtccgggtgtagcacgtaccattgagtctacttgggcgttgattttacgcagacgtttttggtattcgcgtttattgctggctttctgcatacgtagttcggcgcggacgggatagaagaatttctgcatagccttctccttgatatcctggttggcaatcatttccagcgtgtccagttcaccgctggtatagacttttccttgtacgatatagaattgcgacatatccgatttcttttgcgggttgatgtcgtcgttctggcgaggagcagccaacgcgccccgtttgttgaaatggtgaggccgtatctccggcatgatctccgaatttcggtctccgaaaccacagcgggcaccggcgggagcattgcgcgaatcaggagcaccgccctgtatcataaattcagggagtacgcgtgtgaacagcgttccgttgtattcgccccgtttggcacgttcaataaaggtgcggacgtggttagggacatcgtcatatagttttgcttttagggttccgacgctcgtgttgatggtgactattttcgcaggaacctgttcagatgcagatattacggtgtccgcatcgccctgtccgaagacaggagagaggcaggccaacaagcctaataagatacaatagctctttttcatcttttaaaatatttggtgggtaaagatagtatttatgttgttaaacacaaagtaaatggctacctttgcagcctttaaggcaaatttaagattataactacacgtattattatgaattggattaatgatttgttatggggcgagggcattggccactccatacttctgctttcctttgtgatcgctgcaggcatacaattaggcaagatcaaagtcttcggcgtatctttgggaattactcttgtgttgtttgtggggatcattttaggacatttcggttttacgatcaaccacaacgtgattcacttttttaaagagttcggattgatactttttgtctattctgtaggtatgcaggtcggaccgggtttcttttcttctttcaaacaaggagggattacgctgaatatgctggcgtgcggtattgtgttcttaggtgtcttgacggctgtcattctgcattatgcgaccggtattccgatgccgacaatggtcggaatcttgtcgggtgcggtaacgaatacaccgggattgggggctgcccagcaagcattttccgatatgcacggagtgtctgacaatacgattgctttgggatatgctgtcgcttaccctttaggggtgatcggtattatcttgtctattatcttgattaagtatattttccgtgtaagtttcgataaggagaacgagcagttgaacagcgaagattcttctcataccaatgaggccaagccgatctcgttgatcgtgaagaatcccgctatcttcaataagacggttgccgaattatcgaacctgctggaacatcgtgattttgttatttcccgtgtctggcgtgatagtaacaagcagatcgaaatagcttcggccaataccgtattgcaggaaaacgacaaggtttttgttatcacgactgagacggatgccgagacgatcaagacctttatcggagaagagatcgatatggaacgtaaacagtggatccgtatggaaagccaatttatcaaccgccgtatcctgatcacgaaaccggagttgaacggtaagcgtctgggacaattgaaattgcggaaattatatggtatcaatatcacccgtatcaatcgtgctggtgtcgatcttgttgccaaacctgggttgactttgcaggtaggcgaccgtgtgaacgtagtcggtaccgaaacagcggtctccaatgtggaaaaggttttgggtaattcgatgaagcgtctgaatgaaccgaacctgattactatcttcgtcggtattgcgttgggtatcgtgctgggtagtattccaatttccttccctggtattccgcagccggtcaagttaggtctggcgggcggtccgctggttgtggctattctgatcagccgtttcggttaccattataaattgattacttacacgacacagagtgcaaacttgatgttacgtgagatcggtattacacttttccttgcttgcgtaggtattagtgctggtgacggttttgtcgatacgattgtgaataatggcggttttgcttggataggctacggtttcatcattacgtttgtgccgctgatgatcattggttgtatcggccgttatttctgcaaggtcaattactttacgcttatggggctcattgccggtagtacgactgatccgcctgcattggcctattcgaatgcgacagccggaaacgacgctccgtcggttgggtatgcgactgtctatccgttgactatgtttctccgggtattgacggcacagttgttgattctgttcttcgcgtaaccgtactaattaatattatgaaacgggggcctgtatttctatatatgcaggcccccgtttcatgatgtgccagtcttcttttatagaaacgtggcctcttctttcatacatatgaaatccggattacttttttgtatgttctgttgctgtcggaatttgctctgtggttaccggtgtttgctgtgtgctgtctggtacggtggggcgcagggggatcagaggatatttcttccgtcgccggaaaatatcggagaagcgggtaaagtctttcttatacatgatacctacgccctgtgttgtcagggcttgttttagaatcatatacatgtcgttggcatggttgtaggctttcaggcggatatcgccgctgggcgtcagcagatattcgaggtcgaactcaccgatgaaggcattcttctgattgttgatcgtactgtttttgtacccgaagtttccgttgaatatgaggcggttgtttagtaattggctggacagcagcatttctacttccgtatcttcgataccgtcctggctggtccggatatttgtaccgagttgcactttgtcggtgaagctattcatgatactggatatttgggaagaaagggcggatgaggccactgcgctgaaatcattcgatttatattgcgcattgtattccggcgtatagaatttgtttagaaccagtagatagataatttgccgggtcatcatgtcttctgtatcgaccaaacttttgacctgccgttggagttcttcgttggagctcggcagttcgaggtcgaacgagatagtcgggtttctcagcacaccgtctaatttcaatacgcaattgaccggcgtattgcgtcgggagctttcgtacgtcagactgggatccaggtcctgtatgttggctgttacgttatagatggcatttacattcatcgttgcctcgaagggatctccccggaaattgataatactgccatcccgtatcttgaagtttttatggatgagttgttgtaggctgaaattatagtttccttgtacgatcccgatgtttccatacatgcgcaagtcggttttcgtcccgtactgtatctggaggcttccgttgcagttacctgttattttatcgcctgcgaccggatccataatcagctctatatcggcatccggtgtgatgtcgagaaggaagttcatgcgcaattccgccccttcgtcttcgtttttgaagataagaggtttaatggaatcggccggtttggtaagtgccatttcccgcaattcttttttattcacgaaagtgatgaaatcatattctgccgcggaagagttgttcatgaagtcgagtttgacggatgtcttgggatcacttcgcatattgatatcgaagttgatcagttgcccgttcccttttatagaggctgttccggttccgaaaacggttccgaatataagcggattctgcttttggggggcatcgaataccaacatattgtttgtctggactcctacatcgaagctgacatctttgaaatgtttgtgattgacggtcagattaacctttgccgagttgccgaatttgtcatgcaccgttacgttgcgtccgatgatcgcccccggtgtcagatggatggagtcggagaaagtgtagtaggtgttcagatattcgatacccagcccaccatcgagaacaaaggcgtccccctctacattcaacgccttgaacggcccgtgcagatggatattcccgaagccccgtccttgcatgttcttagcgatattttcgacgaaaggatgcaggaaagccaagttcaggtcgtttgccccgaagaagagggaaaggcctgcgtttttgccgaccggatagacatagccgctcacatcagtccaagtcgtatcgttcttgtagatgctgcctaacatcagaatgcctttttgctggtcgtcccattcgctaaaaaggttgaggcgtcctaattgtacttggttgaacgagaagttttgtacttcgagatcggtgtttagcatccgactgccgtagaggtcggtaatgttgaaggttccggtagcctttccggcaaattgaagtactgggatattcagaatgtcaaagatatagctcagttctacttgtttcagatccagtaacagtgtatcggccggatcttttgaaactgttccttccatgtggagatattcggtgccgttggagacggaaaagtcttgtatcccaatcttgccgtctgcaatggtgatagtagacggggctatgtgccaggtggaatcgttcaggatcagcggactcttgttcagtgagatttccgtacgtagtttggcaggtcctttttcctgttcttcctcgatgaagagtgtggaggcggagaggtctgctttaaacaagcgttctttgttgttggtccagctgatctgcgtctgtatccggttgtctttggcatcggctttcaggtccatatagttgcgcaatcctttggcattgtagttggttgccttgagcttcaagtttaccctgtcttccgggttgtcacaggtcagatagccggattcgaacatggacttgctgatgttgaatttaggcagataggcctcgaagcggaagcggttgtacaggttattgtaatgtcctgtgatacgtccttgggtcaacatcgtaaaaggcagtttcagggtgttggatatggcttccgtattttcgatagtcagcaagagggagaaattgttttccatcaccttctgtttcttttgcgtgacgttgatcagagccgggatatacccctttaatgtttgcataaggctgggaacgattgtcgtgaaggaataagcacccgtcacttcgccgttcaagacgtcggaggtgatggccagatgacggtccagtgaatgccccgtagcctctaccttgaactttttcaggaaaaagctgtccggcttggtcttgaaggagaggctgtcaagcgtaatgctcccttctaggttgtcgatattgtttcccgtgaagtcggcattcagtgtgcaggagatatccggagcctcgtatttattcgtcagatggaggctgtccggatggaaatgttccagacgtgaagtgaagttgaacatagaatttttgccttcatgcaggaatagcccttcggcatacagtttgccgttcggatcgttgatgtccaacactccgttgaacccgtttttctggaaattacctgacaggagtatgttttcatatttgtagcctttgtattcgaactcgtctatattcgcctttatgttacctgaaaacgacccgttggcaggacggtgtgtgtccagcgtaacggctaacttggctgttccatacggattaccgtccggaaaaagttcattcaggtgcaagggggaagtcgaaaggtgtcctttcaggtaggcggcgatattcttctccttgtcgtttccgaatatcaggtcggtctggacggaaccgatcgccgacgagaacttgccgaaagcgaccaggttgtcgaagaaaccggatatctctccggtaaagttgatcgtgcctaacttgacgatcgcatccggcagcttgactgggcgttcgttgaagttgttagcaaggcccgaaattccttcggtcgtgatatacatcttattgacttgtccgaagatataggcgtcttccgggtgtgttattcctttcatctccatcttgccgacaaaaagcatcttgtcgctgtatttcagtgtcagccgtttcaagccgatattgtttatgtagcccgatgcctcggccgaaagttcgatggtttccgagaagttgcggaatgccgggacgaaagcggagaggtctttcaggcaaatttgcgaaggtgcgatattcagttcgactggcgaatgatccagtaaatcggatgcactaactgcttctccggtatggatatgggcgcggtctattttaagatctgtttctggcagcttgatttcaaagttgttaatgatcgcgctgtctttgttggctacgatgttgagcgaaagcttgttcagcgaaaagcccgaagcctcgtcgaaactcatcttcttgatattggcattgaggctgtccttgttgaatgccttcatagagattttggcacttatattgcggatgtcaatatgcttggcattgaactttccgggggtagtggctgcattcttcacatcgtaacggaaatttccccggcgtattaagatcgagttgaaacgcaggtcgatattggattgcttttttacggtgtctttgctggcgaaagcatcgatgacgaattgcaggttcaacttatctgccggcgtttccttatgcaagttgacggagaaaccgaacaggcggactgtcgagaacacgatcctgccgtttaacaaaggcaggatttcgaaacctgccgacacatggttggcatcgaacagtacggttccgctttcatcttcgagatacagattttccagtaccaagcggttgaaccattcgatgtctacattcccgatccgtacgggcacacctaaacgctcggataattctctcgttgccgtcgttgccactttttgctgcacatagggaatgcgcaataagatggccggagttgcatagaatatccagaacagagtgagcagggtgacaattatgtatttaagtcctttgatatctttactataatttaagcacaaaactacaacaatatcccgatagatttcgttaatttgcacaaaaattaaaacgaagatatgagtgtgacaatcttaggaatcgaatcatcgtgtgatgatacttcctcatctgtaatacgcgacggcgtgatgttgtcgaatgtaattgccagtcaagctgttcacgaagcctacggcggtgttgttcccgaattggcttcccgcgcacatcaacagaacattatcccggtggttgccgaagcgatcaagcgtgccggtatcgataaatccgaattgagtgccgttgctttcacccgtgggccgggtttgatggggtcgttgttggtcggaacttcttttgccaaaggtttggcggcttcgttggacattccgatgatcgagatcaaccatttgcaggcgcatgtgttggcccatttcatcaaggagacgccggaagacgatcatgctccttcgttcccgttcctttgcctgttggtatctggtgggaactcgcagattatcaaggtgaacgcatataacgatatggaggtgatcggacagacgatcgacgatgctgccggtgaagcgttcgacaaatgtgcgaaggtgatggggctggggtatcctgggggacctgtcgtgaatcgccttgccaacgaaggaaacccgaaggcttttacatttagcaaaccgcatatccccggttacgactatagtttcagtgggctgaaaacctctttcctttataccttgcgtgacaaactacaggaggaacctgattttatcgaaaagaacaagcaggatctttgtgcctctttgcaagcgacggtgatcgatatcctgatgaacaaattgcgccgggcggcaaaagatctgggcattaaggaggttgccgtagctggtggcgtatcggccaattccggcttgcgggatgcatttcttgaccatgcgaaacgttttggctggaaggtgcatatcccgaaattctctttcacgacggacaatgcggcaatggttgccataacggggtattacaaatatctcgacaagcaattttgcccgatggatgcggctccctttgcaagggtagaggtgaaactaaggtaacatgttggtcgtttcatgggcatgaaacaaaagtttcccctgcatgaaacaaaagtttcccctgcatgaaacaaaagtttcctacaggggaaactttttataagatataggaacaaggtaaagaagatacgaatggttatagaaaaagaaataggcgagttgcttcgttcccgccatctgacgatgggaacggctgaaagttgtaccggcggatatattgcacatctgattacacgtgtggctggcagttcagattacttttgtggaggagtcgtttcctacagcaatgaagtgaagcaccatgttttaggcgtttcggaagatagcttggcgcagtacggggcagtcagtcgtccggtcgtcgagcagatggcgttaggtgcgatccgtgtgttaggttgcgactgtgcggttgccacttccggcattgccggtcccggtggaggtacgccggaaaagccggtcggaactgtctggattgctgccgccctgaaagacatggtcgtatcagaatgctgtcatttcgggacagagcgtgaagataatatccggttggcggcgaatacggcgttgaggatgctgcagcagttgctataaaataatatgtttctcgttatttattggcccttagctgtgaaacatcctgtataaaacatccggttgttttctcgtgccgtttggttggacactttgaattgcggaaaggcctgttccagccttagcaccaatgtgtcgcctaaagatgtatataaactgtcggcggtcgaattatagggaagactgccgaaatagcaaagatgattttcattcatgaaaagatcggcgcctaaccaaccttttcggataccccattcggtcgaatcggggagggaaacatagaggtcgagactgtccgattgtaccatcaggttcaacggggcgtttttgtcgaatgacttgcgcaggcggtcttggtcgggtagcaggtaactttgccggtttcgttggatttgggcgacttcttcgagtagtttcttgctgtaacttgccacccatatgccctcgtgttgataataaccgaaaaaacggtttccggtatccgggtaataggtaaaagtgatgccatcccttttttgtttctgcggagcgaacgagccgaaagccttttgcaatgtgtttttctctatccggccgacgaggttgtttcccgcttgtgcataaaggataactccctgtggatggaaagatagaagtaaccacgggatattccggttgttttggatgatggaaaggtagatatccggaatcttcgaggcgaaagcatcccgttccgagtctcgggataagatatatttggtgaaagcggcagggcgatttacacttaggatcgcatccgatgccggggcgactaaggtatatagatcagtccgcaccgtatctttctctttttgcattttgcctaaaaagaaccagactgccaccagagtagcgagagcagctataacgaatgtcactatttctcgcttgtcagctttcattgtacgttatgttttcttgggactcaggaaatatttacaccaaggtttgagaccacattcttcgcatttgggcttgcgggcgatacaggtgtaacgtccgtgcaggatcaaccagtggtgggcgatcgggatttgttcctccgggatatgcttcaccaactccttttccgtttccaacggggttttgctgttgtttgtcaggccgatgcggttggctacgcggaacacatgtgtgtcgacagccattgccggcttgttgtagacgaccgaggctatgacgtttgccgtcttgcggcctacgccgggcaacttttgcaactcgtcgatatcggatggtacgacaccgtcgaaatcggacatcagcatcttcgccatgccgactaaatgttttgatttattgttgggataagatacgcttcggatatattcaaagatcacttccgaagtagaagcggccatgacttcgggggtcggaaaatcccggaagagggcaggagtgatcatattcacccgtttatccgtacattgggcggacaggatcacagcgataagcaattgatacgggttgtcgtaatgcagttccgtttcggcgaccggcacatgcttgttgaaccaattcaagactcctttatatcgttcctctttgcgcatatattattttattagtgacatgaaatttttaccaagaagcaatcctaagaatacggctaacaatcctaacacattgctggcgatcaggtttaaaagtgccaacttatattcgcctgttttcatcagcgacatcgtatctagtgcaaacgaagagaatgtggtaaatccgccgaacagcccggtgaagagaaatactcttgcgcccgcagatagattacaagtttcggctatactccaacagaagccgatgaggaaagagccgatcacattgaccgaaagtatcccgaaagggaaggagtgtagcatcgaacgctgtacccacgtggaaactccgtagcggaatacggtgccgattgcccctcctgttataagtagtaaaacctttatcataccatttacgtttttagtgtgtttttccccgggctggttaaggacccggggaagatggtaaatgatttaggttctcaacttaattggctgactcaaactgtctcagaaaacggacatcgttttcggagaacatgcgtaagtcttttacttggtatttcaggtttgttatacgctcaatccccattcctaaagcataaccggaatatactttgctgtcgataccacagttttcaagcacattcgggtctaccataccgcaaccgagaatttctacccaaccggttcctttacagaacgggcagccttttccaccacagatattacaagaaatatccatttcggcagaaggttcagtgaacgggaaataagatggacgcaagcggattttcgtgtctgcgctgaacatttctttggcgaagaacagtaatgcctgtttcaagtcggcgaaagaaacgtttttgtccacatacaaggcttctacctgatggaagaaacagtgtgcgcgataggagatcgcttcattacgatatacacgtcccggacagataatacggataggaggctcttgattctccatgacacgtgtttgtacggaagaagtgtgtgtacgaagcaatacgtccggattatgttggataaaaaatgtatcctgcatgtcgcgggcagggtggtcttctgcaaagttcaaagaagagaatacatgccagtcgtcttcgatttccggtccttcagcaatgctgaatcctaagcgtccgaagatgtcgcagatttctttctttacgagtgaaagcggatggcgagtacctaattcgataggataggatgtacgggtgaggtcgatgtcatcattcgtcgtctgtacattctcaaagctggctttcagcttattaattctattttgggttgcctctttcagcttgttgaggtgctggccgacttcacgcttctgatctgccgttacattgcgaaaatcattcatcagcaaagatatttcaccttttttgctgagatatttaatgcgtaatgcctccagttcttcagcgtttgccgctttcaggttctctacttccttaagcagagcgttaatcttattgatcatttctaatcatttttattttcaacgtgcaaatttactcctttctttgaatactgcaaccgattacggcgggtttttttgaaaaaagggagtcaactattttctttttatcagaaattgtaagctacgccgatacctaaaatatctttgaactgaactttggcgccgcgtttttcgccttcatcattaatggttttcacgtcgttgtcgtatttgagcgtggtgttgagtgtagcattgaggtatttgttaattttcatgttgatcagaacatcccagttcatgtctacgttaccgaactgcttatcataaggagtaaaaaagtccacgtttatgatctggttcacgtttacgttctccatgattttttgctctgctttagctttaatataaatataagccctgatctcagctcgaaaacggtcgccgggatcgacaccgaatgcaccttcattggacagatagccgtctttcacaaatgtaaaaaaacaggtagcattcgcttttatttacccagacttcacagatcaaagttattatccgttcatcttaccgttttcttttgagcggcaatcgagggaagagctttctaaaacggatcaaatgactcgtgatgttgctgcccgcaatgatgattgtcacggcgagaataattaataatatcccgcaaccgatccttggtgtcaaggtttcgccgaacacggcaaccccgaaaaatacagctgtgaccggctctagtgctcccagtatggctgtcggtgtcgaaccgatatactggacagcactagttgtacaaaggaatgaaatggcggtagggaagacggcaagcgcgatcaggtttccccaaagataccatttggccacaatataaaggtctttcccgaacccgacacggacaaagaacagagatacgccgaaaagcaatatgtaaaaagtcagcggaagcgtagccacgtttttcagtgtcgattggttcactcctattatgtagatggcataggagagagctgaagccataaccagcaaaacaccggtgagactgagtgttgtgccatcaccgcttttatagagcagaccgatacctgatagtgccagtaaaatgcaaaagactgtttgtaaggttagtttctctttgaatacaagtgccataatcaatgcgaccatgatcggatagacgaaaagaagtgtagaagcaatcccgacttccatataattgtaactttggaacaaagctaatgaagaaaaagcaaccaatagccccatgacaatcagtggaactgctgctttatgttctattttgaaacttctccctctccctttaatcatcatgcctagtatgggaattgcgaacaagtacctgaaaaaaagaaccgaatcaggatccattccgtctttatacagtggaagagcaaatagtgggttagttccgtaagtcgcagcggcgatcgctcccaaaaaatatccttttacctttgtattcatgtcatgtagaatttgaggtgcaaatgtaataatatatattgatcttttttgttctgttaaaatctgcaatttgtaatttcctgcccttgtatctctcccttttggaggctggacagggaaggaagcgaaactacagcagcttacaataatccctgcaaaaagttattcacattcggatacctatgagaggcaaaggcatttgcttagtcaaataatagaataaatgtttccgggcattgaaataaaaaggggataaatattgggggaggatacccgggaacattctttgtctttaatttattttgactttttcccctgatgggctacggcatccattagttttttgatttcttccggatcgccgaggaaataatccttcacgaaattcagattatcgtcaaactcaaatatatacggtacggcagtcggtagattgagatgtacgatttcgtctccggaatgttttttaaatatttgatgatcccgcgtaggctgttcccatgagcggcaatcaatatctcatcggaagtttcgagtgaagggattttccttgttccagatactttccccgtggcggagcaatactattttttcatattcttctgtttttacatttatatatataacaacaggacgaaggcgatggattagagctgctttttcattaatctgtaaaagtggttatattatctgtaatccgtatacagtccggttattattatccgtctatttttgcaattgtaaaagcttgtctggtattttatcgaaaaagtagtatatttgcaggcaataatttaagaatcaaaaaattgtgggatatgcctttgaagcgtttcggagtctcgttggaggataacctgctggagtcgttggatcagtatgtgagcgagaacggtttcgccaaccgttcgcaggcgatccgttttctggtggagaagaatgtcgctgaaaagaaatggcaatgtaaccatatcgtggcaggtacgatcattcttatgtatgaccaggtaaaaaaggatattacttcccggattgccgatattcagcaaaattatcaggatgttatcttgtcttcttcccaatattatgtgaaccggaatttttgtctgcacattgcaaccgtgatgggcacagcttaccgtctgactgagttgtcggaccggttgactacgataaaggggcttaagcatggcaagttggttatgagccgggctgattagatatattttttacccgtatggtgacacgaattttgaaaagtgtaacacgattaaataacaatagaaatttaatacataaaagtgagatatgaaaaaagtaattttacttgcttccgggcttttgtgcagttcgctggtctttgcaagcgatccggctgcaattgatagtctgattaatttacagggggttgtgatttcagcgaataaggtacaagtgaaccgaagcagtgtgccacttactatctcggtgatagaccgggagcagatcgaggcgagcagcgaatcggcattgttgccggtactttcccaacatgtccccggattgtttgtgacgcaaaagggaattaccggttttggagtttcggaaggagcggcaggtacggttaacattcgtggtgtcggaagtggaaataaggttttaatgctgttcgacgggcaaccgcaatgggctggagtgttcggacattctttgcctgatacctatgtggcttcggatgtagagcgcgtggaagtgattcgtggtcccggttctttgctgtatggttctaacgcgatgggaggggttgtcaatattattacccgtcatcatgaacaggaaggacggtgtacgcaggcgcgtgtgatgtatggctcttacaatacgcaaaaatatatggtgaataacggttttaacgtaggtaaattcagtagttttatctcgataaatcacgatcgaaccgatgggcatcgatcaaattcggattttaacatcacaaatggttttgctaatttaggatatgctttcaatgagcattataagatgacaggtgatgtaagccttgccaaatcgaagtttcaaaatcctggtaaaacatttgagcctgttatagacaataaaatgaatattttgcgtggaacagcttctatggcattggaaaataatcagggtaagatgagcggggccttgcgcctgttctataattggggaaaccataaaatcaatgatggttacaatccaggagaagagcctttgacttatctttttcgttctgacgaccacaacgtgggagtccaattgtatgaatcgttccgtttgtttaaggggaataactttactgtcggtgtggattataaaaactggggtggacatgcttggaatgacaataatgacggttcaaaaaaagaattggtggataaaacggtgaatgaaacagccgtatatgccatcatgcaacaagaactttttggcatattgagcctgaatgccggtgtccgctatgaacacagtagcacttatggaggcgaatgggttccgcagggaggagttacggtacgtccgtttgaaggaaatacgatccgtgcatctgtctctaaaggatttcgtagtccgaatatccgcgaaatgtatatgtggggagcggccaatgcagatttgaaaccggagagtatggtaaattatgaagttgctgtcggacagtcttttttagggggcgacttgtatactgagctgacagctttctttatcgacgggaaagatatgatttattccgtaagcgtgaatggggacggtagacctccttataagaatttgaatacaggaacctttacgaataaaggtatagagtttgaagctcgctatcagatttgcaagaatttgaacctggatatgaactatagttatctgcacatgagcaaacctattcctggagcccctgggcataagttctatgcaggagccacctatatgccgggacgtttcaccttgaacgtgaatatgcagtctgtctttgatttgtatacagatgcagaatgctctaagaaagagaattttacaactttgaatgcgaaagtcgcttatcgtttcggtacacgtgataaaggattgaacctctttgtgaaaggagaaaacctgacggcaacccgttacactattaatgatggttttccgatgccgaaagcgatcttcatgggtgggatcgatgtcactttctaaacattttgtatacctttgcgccttgtaacaattaataaaaatcattatgtcagttgcaaaaagggatttagaggataatagaaaggtgaccacacatcgcctgatagaaatgaaacagcgtggggagaaaatttccatgttgacagcttacgattattcgatggctcaactgatcgatcaggctggtatggatgtcatattggtaggcgattcggcttccaacgtaatggctggtaatgtaacgacactgccgatcacgcttgaccaaatgatctatcatggcaaatcggtcgtgaaagcggtgaaacgtgccttggtggtggtggacctgccttttggcacgtatcaaggaaactcaaaagaagcgttggcctcagctatccgtgtgatgaaggaaacgcatgcggattgtatcaagcttgaaggaggttctgaaattcgggaatctatcgaacgtattctgtgtgcgggtattcctgtcatgggacatttgggattgacgcctcagtctattaataagttcgggacatatacggttcgtgcccgtgaagaagcggaagcgaagaagctgatcgcagatgctcatctgttggaagagatcggttgctttgcaatcgtattggaaaagattccggctgctttggctgcacaggtcgcttccgaactgacgattccgattatcggtatcggtgccggcggaggagtagacggacaggtgttggtcatgcatgatatgttaggtatcaaccagggattttctccccgtttcttgcgccgttatgcgaatttggcagaagatatcacccgtgccgtgcagacttatattgaggatgtgaagacgcaagatttcccgaacgagaaggaacaatattaataatgtgtcagtcccatctgttgatcggtgctgcttcatcggggagcgggaaaacaacttttacactaggtttgcttcgtgccttgaagaaccgttcgtttaaggtgcagcctttcaaatgcggaccggactatatcgacacacgccatcataggatggctgccggtaatccgtccgtgaacttggatctctttatgatgtcagaggcacacgtgcgtgatttgtatgccggctatacggaaaaagcggatgtggcggtaaccgaaggcgtgatgggattgtttgacgggtatgacggtatgaaagggagctgtgcggaaatcgcctgtatgctgaaaataccggtagtcctgattgtaaatgcgaaaagtacggcatattcggtggctcctttattgtacggatttaaacaattcaacaagcaagtgcagatagttggggctgtctttaattttgttgcttccgaaaaccattattcttttttgaaacaggcttgtgaagatgccggagtcgaggcattgggatatcttcccaagtgtgcggatgtggagatccccagccgtcatttagggttgtctctcgatgaagatttctgctttgaagagttcgccgaccgtgtagcggaacttgtcgaaaagcatgtaaacatcaatcggttgctggagttgacaaaaccagttgcgacagcagtcgttcctatatccgcaggtcgtcatatctataaacgtgagccttctttccctattgcggtagcctgcgatcctgcattcaattttgtatatgaagcgaatattcgctatctgcatcatttaggggaagttacgtatttcagtccgttggcagacacttctttgccggatgctggtttcgtgtaccttcccggaggttatccggagttatatcttgctgctttatcggcaaacaggcagatgcttcaatccattcgccggtatgttgagagtggaggaaaattgttggctgaatgtggaggcatgatgtatctatgtgacgagatacgagataaaaatggatacgtttatccgatggctggcgtgttgcaccagtctgcaacaatggagaatatgaagttacgcctgggatatcgcaccttattatacaacgaaactcgtctgaaagggcatgagttccactattcccgtctggtggaacaacagaatccgcttccgtcctgcgctgtcgcttatactgccaaaggagtggaaacggatactccgctttatcattataaaaatgtttgggcaggatatacgcatttgtattgggcggatccggtcggaaacgaatggtttaccaaatttgtcatcgatggcaatacttgaagtctgtatacaaataaataagaaagatgaaaatatatacgcgtggaggagataaaggtcgtactgggattcatggaggcgagcgggtggataaagatgatatccggatcgaagcgaacgggacactggacgaggtgaatgctgaaataggcattatccgtgcattactcccggctgaacatgaatggcaaagcttgctggggaaaatacaaatggagatgatggcggtcatgtcacatgtggcgactccatcggctattcgtgataagaatccgaacaaaatatccgatgatctggttcttgtttgtgaggaacagatcgatgctttgtcggcaaagatggaggataacggttattttatcctgcctggcggctctttggtttctgctcacttgcagttggcccgtacgatcgtacgccgtgccgaacgccgtctgtggacgttgaaccggaaagatccggtttcaccagggatcatgcagttcgtgaaccgcctttccgatttgttttttacaatggcgcgttatgaaatgttttgccaggggaatgcggaggaacgttggcagtcgtttttgtataagcggaaaaagcaggacaatacctgatgatgcataaaaaaggagtgttcacatttttgtgaatactgggagaatatagtatatttgtacgcaaatacgagaacgatatgtttgttacattcgaagaagcatatttgcgtgacctttatgagaaaggaaagactgatgacaagaagcatcgttatcagcctgatgtgataaggcgttatcaaaagtgtatagattttcttttggatgccaagaaggtagaagaacttcttttgataaattccttgaattatgagatgctgaaaggcgataaggctggtatttcatttgtacgggtgaataataagtatcgagttgagtttaccgtaagggattcgatagaagaaccgattgttaccgtatgtaatataatagaattatcaaaccattataaatgattgtagctatgattacacttcaaggtattgatcctaaaatgatcgccaataatttaactccatccaaccccatacatccaggcgagttgataaaggatgagatagaatatcgaggtatctcgcagcggaaattggcattgcaaatgggggtttctccgacattgctgaatgaaatattgaatggaaagcgttctgtttcgacagaatatgctcttttgtttgaagcggcgcttggtattgatgcagaagtttggattcgtcagcaagctcggtatgacatgcaaatggcaaaatccgatacctcttttttggagagattggcccatattagaaaaatagcggcagtattatagtaggcacagattaaaattaagaatagatatgatatccgtaaaaaaatatatcgagtccaataaagaccgtttcatcgaagagcttttctctttgatccgtattccatcgataagtgccaaacatgaacataagcctgatatggaggcatgtgcaaaacgctggacagaactcttgcttgcagccggtgccgataaagcggttgtgatgcagaccgaaggcaacccggtcgtgtatggggaaaagatggtttctcctgaggcgcagaccgttttggtctattcgcactatgacgtaatgcccgccgagccgtttgacctgtggaagagtcgcccgttcgaacccgaaatccgggatggccgtatctgggcgcgtggtgcggatgatgataaagggcaggccatgatgcaggtaaaaggtttcgagactgccctgaatctggatttgctgaaatgtaatgtgaagtttatcttcgagggagaagaagagatcggttcgccgagcctcgaagccttctgccgtacacataaagaattgttgaaagcggatgtgatcctggtttccgataccagcatggtcagtgccgaaacgccatccctgacaaccggacttcgtgggcttgcctattgggagatcgaggtcacgggtcctaaccgcgatttgcattccgggcatttcggtggtgcggttgccaacccgatcaatgtgttgtgtaagctgatggccgatataacagatgctgacgggcgcatcacaatccccggtttctacgatgatgtggaagatgtttcgcctgccgaacgcgagatgatcgcccagattccatttgatgaagcgaaatataaagcggccatcggtgtggatgagttgttcggtgaaaaaggatattccacgttggaacgcaatagttgccgtccttccttcgatatctgcggcatctggggcggttatatggaagagggcagcaagacggttcttccttccaaagcatacgccaaagtttcctgccgtctggttccgcatcaggatcatgagaagatttcgaaactgtttgaagagtacatcgctcgtgtggctccggcttatgtcaaggtaagagtgacgcctaaacatggtggacaaggttatgtttgtccgatcgatcttcccgcttataaggcggcagaggaagccgttgccgtagcttttggcaaacgtccgttggccgtgcgccgtggcggaagtatccctattatctcgactttcgagcaggtgttgggcatcaagactgtcctgatgggattcggcctcgaacagaatgcgattcattcgcccaacgaaagctgtacgcttgacttcttttataagggaatcgagtcggtagccgaattttataaacgattcaattgatatgacaaataatgaaatagttgttcgtgcgcttgccaatacaggcattactgctctgaacgagatgcagcaggcggtattggatgccgggacgacaaaagacatggtgctgctcagtccgacagggtcgggcaagacgctggctttccttttgcctttgctgacgacgttgacggatgaggacaaaaagatacaggccgtgatcatcgctccttcccgtgagctggctttgcagatcgaaacggtattgcgctcgttgggggccggatataaggtgaattgttgttacggagggcatcccatccgcacggagaagaagagtctcgaacatccgccgacggtcctgatcggcacgccggggcgtatcgtcgaccatctggaacggggtaatatcaatctggacagtgtgcgtacgctgatccttgatgagttcgacaaatcgctcgaactgggtttccttgctgaaatgaaggagattttggcacatctcccaggcgtgcgccgccgggtgctgacttcggcaacggcagcagtcgatattcctgctttcactgggattacagctccggtacgattgtcgttcttgaaagatgtgaaggagtcgaaagggctggttttgcgtgtggtcaagtctccagttaaggacaagctggaaaccttgtacaagcttttaggtgaactgaaaggtggttctgcccttatcttctgcaattatcgggagacggtagaacgggtgagcaactatctgaccgaaatgggtgtagataacgaatacttccacggaggaatggagcaaccggaacgtgaacgtgccttgtcgcatttccgtaacggcagtgctaccgtattcatctctactgatttggcctctcgcggtcttgatattccagaagtgaagaatgtgatccattatcatcttcctgtgagtgaagaggcgtacgtgcatcgtaacggacgtacggctcgtatgaacgcggaaggggttgcttatctgatcttgaatgcggaagagacgattcctgaatatatcacccgcgagccggatgagtttttcttgccggaagtggcaaagaagcccgtccgttccgagtgggtgacactgacgatcaatcgggggaaacgggacaaattgagcaagaaggatgtggtcggcttcctctttcaaaaaggtggactggaaaaggacgatttaggcatagtcgagataaaggaaagttgcgctttcgcagctgtcaagcggactaaactatccggtttgctggggcgtattcggaatgaaaagataaagaacatgaaagctaagtttatatgagcatattgataaaaggcgctttattggatggtgctgtaactgatgtctatatagagaaaaaggagatcaggcaggtagggacggatcttcaggtacaggcggatcaggtgatagacggaaggcgtaaagccttgatccctggtttcgtaaatgcgcatacacatgccgctatgacgcttttccgtggttttggcgatgacatgccgttgatgccctggctggagcagaagatctggccgaatgaagcgaaattgacgcgcgaggatgtttattggggaacgaagctagcttgtctcgaaatgataaaaagcgggacgacaacgtttttcgatatgtatcataagttccgggctacggccgatgctgtcgaagaaatggggctgcgtgcattgcttgccggcgtctgtttcgatcatttcaaaccagaattggcagaaaagagcaagcgtgaaaacgagaaacttgttgtcgatgtggaaaactatagcaagcgcatacggtatgcggtcggtccccatgccatttataccgtgtctggcgaactgttacagtggatacatggttttgctgccgagcattccgtcccgattcatctgcatttggcagagacggaaggcgaagtcagaaactcaatcaaacagttcggctttactcctgtacgttatttatataaattaggtatattatccccacgtctgatcattgcgcacggtatctatgtcgatgatgacgagattcgtatgctggcggatcacggagtgaaagtggtgcataatccggcatccaatatgaagctggcctccggcattcaattcaaattttgtgagatgcgaaaggccggtgttactgtcgctttgggtactgacggttgttcttcttccaataatctggatatgatcgaggcgatgaaacttgcttcgcttttaggcaaggcttggcggaaagacccggaggcgattccagctggtgaaatattccaggcggcgacggaagccggtgcttcggctatcggactgaaagccggacggattgccgaaggctatctggcggatctctgtttggtcgatttggatattccggcttttaccccgaatcataactttgtctccaatctcgtgtatgcagcaaacggcagttgtatcgataccgttatctgtgatggtaaaatcctgatgcaagacaaaaaggttccgggcgaggaggagattatggagcatacagccgaacttgcctataagttggtaagagaaccgtaggcgagaaaaccgaagtaccctcgatatgaaacctattcttttgtgacgttgaacaattaatttgaatgtatatgaatacaaatgacaatactatttatcgggaagcggctggttacctgtcatctcgtattactggtaatccggaaaccgctattatcttaggcagtggcttgggttcccttgccgaccagatcgaagaagctgtggttattccctatagtgagattccgcattttatgcattcgacagccgcaggacataaaggaaacttcatctgcggcaggttaggagggaagcaggtgcttgccatgcagggacgtttccattattatgagggctataccatgcagcaagtgaccttccccgtccgggtgatgaagctcttgggtgttaagaatctgttggtttccaatgccgcaggcggtatcaatacgagtttcaaagtcggtgacctgatgatcatacacgatcatatcaatatgatgcctaatccgctgatcggtccgaatgacgaacagttcggaacccgtttcccggatatgacgcgcgcgtatgaccgggagtttattgggcttgtcgaagaaattgccgcatcccacggtatctcattgaagaagggcgtatatgtcggactgacaggtccttctttcgaaactccggctgagtatgctttctacggcagggtcggaggcgacgcgatcggaatgagtacggttccggaggtaatcgtggctcgtcatgccggtttgcgtgtattcggtatgtccgtgattacaaatgaaggctatcattttgccgatgatttcgtcaataacggggccgatgtgattgtcgtcgccaatcaagcggcagcggtcatgaccattctcttccgggaattagttgccaagatataagaagggaagaagatgaaaaagtgttggattatggggattgtgggattggtgctttttgccgattgcaccaatgttggtgcacaataccaagtttgttgaaatgcttgataagaaggacagcattgtctggcaagaaaaatatccggtacaagccggcattgctgacggtcacatttatatagataaggagctgaatcctagaagattaccgtatccatgcctataccagattctcctttttggacgatactatccgtcctttttatcctaagaagatacgtatcgtaaagactatagcaaataaaggatatgattcctccgtacctcgcggatacgcgagtcgctaaactgaccttttttccggaaggaggtattttgatagaggggatacctgcaaaagtggcattcaaggcgttgaacgagaaaggtatatatggtataaaagttttttcgcaaaacaactgtcatactatcatagttgaatttatatgactgtataacagtttgttattctatgatagttcctgttttcaactatcattcatctatcataaccatgtaatcgtctcgtaatcgtctccgcgatgctacctttgccatttatgggggagtaaattttttatagtctcgtgatctgtattgggatttatatcaatgagcttagtaagcaaatctttaaaatactcaaatgagttaatgttgttgagcctgcacgaacaagccagtgagtagatcagtgcagcccttttagccccctgatgactcccacagaataaggagtttctgcggcttaagctaatatatcgcattagtctttcaatcgcattattgtccggagcatagtctgcactgcggatataattgcataaagcatcatattcgtttaacgtatagttaatcgccttacttaattcacttttgggtaaagtcgactttttgttttttatatttatcagttcctcttttaattctttgaggatagggggagcatatttatttctatagtccagtatctggcgggctgtccagtccgggggaatgcggtgctcattttggtaaaggcgattgatgattcgtacgattttttcagcatccttgtttcctgttatattcaggaacttgcgtttgcaatgttggaaacaggataggcggatggcatccggataggcctctttttctattatcttgtaatttcctaatccgtcactttgtatagctccccggtagtcttccctgagataaccggtcaggacctttctggaacgtgaaccgttttcgtaaaagaaatgtaccagttttagatgattagccagtgctgcccaaatatatcctttggctgtggatttgccggatgagttgtttgtatcactggtaagaacggtataatagctctcgtccatactcagataattgtccgagaggacagtctctttgagaacatcttcaaccaggtcaaacagaccggccgcttttttaatcagtccatgagccgtggctttattcatctcaaagccatgctctgcgaagagtttgatgatacgttcgactggcatggagtagatatagcgcaactgcaggataccggcgatgaaggatgcatcataattagagttcaacaaggggacagctggcagacttccggcataaacagtgcctttacaggcataatagtgctggtgatagatatgcttgataaaacggggaggaataaattcgtagcggatgcaatctgtcgtacgtatttttttgccttcttccactttgaactctgctgcatccggatagatatcatgatggcaggtttccagattaaaatattctttgcgtctggctccgttgttccctctttctttcagactgggttttactttggctatgattgtcgttcctttatcggggacagagacctgttcggatttcttgcccgataccatctttcccaatatgcggactttactttgccggccttcaagggatgcattcttttccaacagggctttctccaacgagaggatggaactgtttaaggatttgacttccgcagtcaggatattgagctgttcattctgatctgcgatcactttcaacaactcctcttcccgctgcgcagccaatttcaactggtcttccaataagagggcaatccgcttgtaatccatgccttaaagatacggatagttcttccggcggcaaaatatttatgcttttatttataaagcggcgccctacaaatcaatagaccggactacaaacgaaggcgtttcctgtacttcactgaattcagagagatgcctgacatgatcatcatgaacgttttccattcgatcttattccagtcctcacggggattaaaacgggggagttcaaaggtcccgtcctctaaacgcttctgatataaaataaatccgtcttcctgccagcgcaacagtttgatcatgtcccgttttttaccacagaacaaatagacatctccgctgagtgggtttcctgtctttgtattgcgaaccagttcggataaaatctctattccacaccccatattgatatagtaagggtaaagataataatgcagggattcgttcagactaaacatttggattgcctgttacttgggtgtataattcaaaaagcttcattaaggccgaaggggtggtctcgcggatactaatggatacaccgtcagggaaagagaggatcgcacctttgatatattggtccaaaggaatattgcgtgaggatatgcaggagttcttgatcggaaagctttgccctgacacttctataagtgaacttttcaagttactgtcattaccgtttttttccaataatacttccaaacgtaaacttcctacgcttcgattatgacgatgcatccattgcatcactcctttataacgtaccccttgtttacggcaaaaggtttgaaaactgtcgtaatgagggcgatcttcatgcaaatgtgccttgtaggcttctactgtacggggaaaacgagtttctgctttcatctttttttgatgacaaagctaaatactcttgtttgaagaacaatggtagcatcgcggagacgcttacgtcttaaaagttgctggcagaaaaatgaattatgtcatttccttcatccgtaataccctgaatgcgaaatattccggtatacagataaaggaatgaaggattatttttcaataacttttgttggaggatgcgatctctccggcaatcaattcatatcctttatcgtttggatggagaccgtcaccgataaacaggctttcgtttattttgccgtcttgcagcaatagggctgttcccggattggcaaattcgtaaccttccgtttccaccatctctttaatatcgaagttgatgttccttacccattgttcctgattgcggcggggaaggatgccgatcactttgacggaggcttccggttgccgttgacggatggcggaaaggaggaagcggagaccttcgacgatctctttgtcgttgttcaggccacaattattcgtgccgatcatcaagacgacttttccggccttatagccatctagttcgccatggtatatacgccaaagcacgttttcgatacggtcccatccgcagcccaagttctggaaaccggcaggacgcatgactttttcccaggtctcccgtccgttcttgttgcggtgttccggttcgccaccccaatagtgggtgatcgaattgcctaagattacagctttaggtggatggttgcgtacctgctccaggaaagcgcggtgacgggagagccattcgtacatatgcggttcccggcgttgggtgacggggatggttgttgtcagggagccaaggggaatatgcaggatttcccgtacctttctttctacgacaatcgcctgttgcttcattccgaagtcggatgggtgcacatagtcaacccaaccatcggacggtatgttcaggtcttcgcgggacaaataatatacatctttaattccttcggactgaatctgctcgtatgctttacgggaagcacggttaacctgggtgacttcgttgtattttattgaatccatatacatattgctatagcctccgtgttcgatcagcaagatgggagccgaatgtttttcccgaagttgcttgacggcggcgatggccaaagccgtaacatcttcttccttctgattgggcaagttcggcatgcaatccagtatgtacagccgggcatccatttcgccgatgaattgcagcacttctttcgccagtttgccattgccggaaaagccgaggtttatgagcgggtaatccagcgaacgttggaggatcgttccccatgccattgccgggcgggaggcgcaggccccttgtgcgatcgaagttccgtacaggacaatcggcttttcgggagaaaccgggatgaattccagtttcgcatcttcgggtataccgatctccagccatttcactccgttgtataaaggcagataaagccggtattcgaaaccttgtttgtggtagcggtctttgcctatattattatatgtataggtgatcgtgtccttgaaagaatagttgccgaaacaaaaatgccattccccgtcgctgttaatgctgtaaaggtcgactcccgacactccggtcgaaggcatatgaggcatattcaggctaccggtaacggtgtagcgcactttgatctgcggggcattactgtagaaatgaatggcgagtcctgccgaatgccgcgacaggttccataccgattcgctcaccacgccttttgcacgttcgggcaggcgtgtgtaagaatttccgatctcttttgtgaatccttgattttggataaccggaaaaccggcttccatcgggttgtgccatttccattgggcggcagccggaaggaaaagcaggcaacaaaacaataaacaaataagctttttcatggatattatctccttaataaccgtattatgatacaatatctacaaagataagacaattttgcaaaagcatttcctgattaatcctgtatatttgtcgccagttaattaaatttgaaaaccatgaaattaaaagctcttattgtgttcttcttgatggggagcatgtcactgacggcacagaaaagctatcagttgcaatcgccggacaaaaaactgcaagcagtcgttacggtaggtgacgatattcgtttctcatttacacacgacgggactgaagttcttgccgcatctcccatctccatgacgttgcaaaatggagttgtcttaggggccggccccaaagtatcgaaagtgctgaaagccgcagtcgataaagtgatcccttctcctttctataaaaagacggaagtacaggatatctataatgaaatgacactctcgttccggggtaactacggtcttgttttccgtatgtataatgacggtctggcctatcgtttcacgacgaagatgaagaatgatatcatcgtcgtggatgaagaagctgattatactttctcttccgaccatatggcttttgcgccttacgtgaacagcaaaaaggctacatttgaggaacagttcatgaactctttcgagcagccgtatgtacatgaaccgatcacgaagctgaacagcaagcgcctgatgatccttccgctcctggtggaactggacggtggcaagaaactctgtatcaccgaggctgacctggaagattatcccggtatgttcctgaataactcgaccgacaagccggtgttgaaaccggtattcgcctcttatccgaaagtgaaaaagcaaggcggtcacaataatttgcagatgttagtggaagaacgcgaagattatatagccaagacaagcggcacgcgtgctttcccgtggcgtatgtttatcgtctctgagaatgacaagcagctggccgattgcgatatggtgtatcgtctggcttctccctgccgcctgcaggatgtttcctgggtgaaaccgggcaaggttgcctgggactggtggaatgactggaacatttacgatgtggatttccgtgccggtatcaacactgaaacctataaatattatatcgacttcgctgccgaacatggcatcgaatatgtgattctcgatgaaggttggtctgtcaatatggctgcggacctgatgcaggttattccagaaatcgatattccggaactggtgaattatggcaaatctaagaatgtcggaatcatcctctgggctggctaccatgcattcgaccgggatatggaaaaggtggtgaagcattattccaatatgggtgtgaaaggattcaaggtagactttatggatcgcgacgaccaggagatcgtcaacttcctctacagaggagccgaaacttgtgcgaaatataagatgatggtcgattatcatggtatctgtaaaccgacaggtttgcaacgtacttatccgaacgtgatcaactacgaaggcgttcatggtttggaaaatatgaaatgggcagccagtacctacgatatgccgctttacgacgtgacgattccttttgtccgtatggttgccggtccgatggattatacacagggcgccatgcgcaatgcgatccgtaaaaattatgctccgatctataccgaaccgatgagtcagggaacgcgttgccatcagctggctacttatgtgatcttcgaatctccgctgaacatgttgtgtgataatccttccaactataaccgggaacccgaatgtacggaatttatcgccaatatcccgaccgtatgggaaaagacggtcgctctggatggtaaagtgggcgaatttgttgctattgcccgccttcacggtaatgattggtatgtgggcgctttgacgaattgggatgcccgcgaagtggaacttgacctgtctttcttgggtgatggcaattataaactggaattgtttaaagatggcatcaatgccgatcgtgccgcctgtgattataaaaaggaagtcataccggttcctgccgatcgcaaggtaaaggtgaagatggctcccggcggtggttgggcagccaagatttataaataaaacgtatttcccgtgtagttgtaaaacacacggaccccgaatgtctgccggaacaacgcgtatttgtctatacccgtacaatgacaaatcccgatctgttccggcagattgtttttcaggtagtccgctatgatactgaatttctcgtcctgggcattgtggatatgaaaacctccggccaggagtttgaatgtatatcctggaaaacagttgccgatagtccggagaatattggtgattccccggtgggaacaggcactcaatacggaatatgtgttttctgctatcaatgcgaccgccagttcgtcattgaaaatatcgggaacaactccttcgggcgtttgggtgaagaatcgttcgaagtgagtatcttcaggatttataaccggaaggtccgggaataggaacaatccgggaataagttccgtctgcccggtgataaaacggaatcgggataaatccaacaggttggagtcaatgactccgttctcccgtttatctttaaactttcgataaagggcttcctgtttacagataaccgaagcttttttattgacggaaaggaaatgccgcaatcctcctgtatgatcgctatgtccatgtgacaggataaggaaattcacttccgcaatctcgatatccgaaagtgtcgcattgcggataaacagatccgattgtcccgtatcgaataatattttatacccgttgttttcaataagcaatgaaagcccgtgttccgcttgtaagttccgcctgtagacggcattctccacgagcgtcgtgattttgtaatgcataatcttattcttttaatacccgattacgggacaaaaataaaaaatccccttaacaaaaacttgctaagaggatttttttgaggttcctggcggattcgaaccgccgtacatggttttgcagaccactgactaagccactcatccaaggaaccgaaataaagtcgtgaaaaataattttcaattataagaggttcctggcggattcgaaccgccgtacacggttttgcagaccgctgactaagccactcatccaaggaaccaatatgtttttgtaaacattccggttttgcgagtgcaaagaaagataatatatttggaatatgcaaatctttttctctctttttgttttcggggaggtttggagaagtaaggaaaaagaggttactttgtcatctattagcataaacaataagataatgacatatattgaaactgaaatccccggtgtgtggatcattgaaccgaaagtgtttaaagatgcacgcggttactttatggaggcttggaagaaggcggagtttgaagaacatatcggcaaagtggaatttgtgcaggataacgagtcttgttcatcaaaaggcgtgttgagaggattgcattaccagttggctccttactcgcagtccaagttggtacgcgtgataaaaggatgtgttttggatgtggccgtcgatttgcgtaaaggttctccgacattcgggaaatatgtagcagtcgagttgtccgatgagaataaacgtcaattttttatcccacagggattcgcccacggttttcatgtcatgagcgaggaagcggtttttacttataaagtcgataacccttatgcacctacacatgagcgcggattgcgttttgatgatccgacggtcggggtggactggaagatcacggaaccggctatcctcaatttgtcggataaagataggaatgctgctttactgcaagacgctgagataaattttgagttttgaattatgaattaaaaatatagatatgaaaacttacttgattaccggagcggctggttttataggcggtaatttcattaaatacatgttggcgaagtatcccgaaataaagattgtggttttggatctgctgacctacgccggtaatctcggaacgattgccgaagacatcgacggggagcgttgcgagtttgtgaaaggtaatatctgcgatcgtgcgttgacggacgagctctttgccaaataccagttcgattatgtcgttaattttgcggcggaaagccatgtggaccgcagtatcgagaatccgcagctttttctggtcacgaatatattaggtactcaaaatctgctcgattctgctcgtaaagcgtgggtgacgggcaaagcggctaccggttatcctgaatggcgtgagggtgtccgtttccaccaagtgtctaccgatgaggtgtatggtagcctgggggccgaaggctatttccatgaaacgactccattggacccacgtagtccgtacagtgcatccaagacgagtgccgacctgtttgtacaagcttactccgaaacttataagatgccggtcagcatcacccgttgttccaacaattatggtccgtaccatttcccggaaaagctgatacctctgattattaaaaacattctcgaaggtaaatcgcttcctgtttatggtgacgggacaaatgtacgcgactggctgtacgtggaagaccactgcaaggctatcgacttggtgatccataagggacgggcaggggaggtctataacgtaggaggccataacgagaagcagaatatcgagatcgtgaagttgacaatcagtaccattcgccgattgatgacggaacaacccgaataccgccggattctgaagaaaaaagagatcggtgcggacgggcagatttccatcgactggatcaacgacagcctgattacttttgtaaaagaccgtttgggccatgaccagcgttatgccattgatccgacaaagattacaaacgaattgggctggacacctgaaacttctttcgaaaccggaattgtcaagacgatccgttggtatctggacaaccagaagtgggtggaagacatcacgggaggagattatatgaaatattacgagcggatgtatgggaaccgttaaggttcccatacatccgcagcctttaccaaagctaagtcttttcctaattccggcgcagcttcctcgatctgtttgcgtactgcgtcgcggatatctttccggatattcttgcgtgtgctgtccaattccgcttgcttggccggcttgaatatatccttgtatttacatttcgtgatcttatatttgaaattatccaggttgccggtgatgtcgattcctaatttgaaaggaacgggcgatttgagtaccgatagatggtaattgaatgtcatgtccaaattatgcgttccgccgacagccactttgtaacggtccatttccaccaagaatgggaagacttcgatcttattgtctttgatggcaaggtctactgaaatactgtctatcatattccgtttcttgtttttgaacatcagtgtcttggatatttcggtaaatgtttctccatcgagcagtaccatattgttcccgtgtagatagcaagacgagttaatggacggcataatgagagacatggtcgaatccatcttgcaagtagccgtgacctgacaatccaaaacaccttcgaacgaacggagcatcgggactaatgtgtcgatggaagggaagagggcgatcaacttctccaccttcacatcttccatatcgaggtctaaaccggcggttgcctcctgtccgttcttagcccggtagaccattgtcaggttcccattccccatattggattgtatattgagcttgctcaagttgatactctgatcgcgcaggacaatctcgccgaccacgttctctaattccagatccttgaaatcgatacgttttgcattcgtatggagagccatgtcgagaaaggctggaagaacaaataattggctggtcgtgtcggtttctgtttgtgcgatactatcttgcagcgattcggtattgagttgtgcgatattttcatcactgagcattagcaggtccgtgttttccccatattgcataccgttgttgactgcctgcatcaactgattgcaatcgatataatccgaatttagattgaaatttcctttcaactttcctccgcggagcatcgctttccggatctggctgatctcgccgttaagggtgaaattgcttttgccgagatgcaggcgggcatctgtcagtgtgatgtcgtttgtgttgaacctcatcgtcgtcggctccatccatatcgggagtgggaacatgcggctgaaaccgcgcatttgtttgaaagagatgctgccccgtgcttcccatttgcgcaggaattgaccttctgttttgctactgtcgccgacggcagttttcccggccatcttctttctcttttctgtcagatgtacacgttgttcgtcggtcagtgtgcggcgttgccggtttgccatctgtaggcgttgtgcatcacgatagggaagggcctcgatcgtaaacgagcttcccgtcagggagagtcctgtccgtaaaggcatactgatgtatttcagcgtgtcgatcgaaatgacagcggctgcagtcggggttagtttgtcggaagtggacggtttgataccacctttcagttcggaacgtccggccacgatccagacggaatcggccgttcgggttctcagatggttgaaggccaattgcccggtcatcggtatgacggctgttgtatcaataacaggcgatgtttgagcaagcatttccaatttacttatgttcgtgctgatttcatctttatatttgatattcaggctatctattcccatcgtcatccgcatcaggttttgtgattcgatgtaaagacttttctggtgtgtcgtgtcgattgtcagataggcatcggaaatgaaaatatccatgccgagtgactggctgaacgcttttagcttgtcaatattgagttttcctgaactgtgtatcttcccgaaccggctttcgacaaggtcattcacggtaaaagtggtcgataggtctgcatccattacaccttccactaacagcgtgtccggattaaggaattcctgtcccaaccgggtgaagtccactttacctttcattccggcccggacggccggatttttgaacaggttggttactttggcctgcatatccaatgaagtgttgagccctttcatcgtgagttgttcgagcgagacgaaagaagaatccggaaaaggtccgttcagatggatatctaggtccatttccagtgtgtcgataccttgtttgatgtcctttatatgataggagccgttttctattttgcaacacaggttcgcatttggtacgatactgtcccctaagaaaccgtgaatgcttccttccataaggattgaaccttccgcttgtatcttatcgcgattctggaaataggcatcgggaatgaatttcagcagatcgttcatatccgagattttcaatcccatatccatatcgatacgggtgtgtcggttttccggaaagtggcgtatagtgccatcggcggtgaaaggcagattgttcaccttcaattccgcatctttcaaggtaatcgagttgtagtgttcggcgagcactaacctgcttttgagacgaagtgacaagtcgtttttcaatgtataagttgggttactgaataaaagggatgaacagcccatttccaaatcgagtgtattggctcctccagccaatgaaccgtcaaggcgtacgaagaagccctgcatttcggtaaaaaggtcagcttggcggtcgtcatatgtgaaatgtcctccgtagatgcgtaccttttgcaggtcgataggcggcaggggctttttgcctgcatcggtctctgtcgaatccgtctcactttcgtaaatatcccagttcgcacgtccgtttttattgacgaatccatagaaacgcgggttctcgatggaaaagtctttgatggtgatcttactaccaaaaaggtaatcgagtggttgcaaagacagggttgcccggttgaaagcaagcagcgaatcggaaggaattgccagttcttcttcatgggcggtcgaatcttcggctgcgtgcgagatcaggtggccgttcgtcagcttcacgcctaaataaggataggtttcgaaataggtcagttccacccgttcgcaatccaaatgtgcatcgatgaacttatttgcctgctcgataaccagtggcgtcagtttctctggcggcaatactccccagttcagaatgctgaacccgatagccgggagtatgaatatcaggattatagtcgccagaacgatgatcgtcagtattttctttttccttttcatatttatcttatgtatgcttctgtcaagaattataatatacaaaagtatgaaaaagccggagatgacgaaggtgatctgttgccttttttgaataatccgtttagtgcttattccgttttgccatttgaagattgggtcgtggtttaaaaaaagatagacaaagtaagattaggatcgcatggcgagcccccttattgtcaaaaacgatctgaaattgcaaaatctgagttaaaataaacggtttgcagaggtctgttttctgtttaaaaggtggttaggaaaagactgttcccgtgaggtgcgcagttttttcccgcgaagacggtcttcgttgccatgacgaccgtctttgtataaggggaagtcggcatcctggggcgatgaagtccgtttttacggcgaggaagacggtcgtcacggaaacggggtgccggaatccttgaaaataccctcggatttctttccatattccttgactctcccttttgtttccccggatatccgattctccgggagtttagctttgtcggaatgtcgggaattccggtaaaaagattgacaaacagccggctttttttattttccaagtggacggttttcatatatgccacgaaaagtgccgttttggtgtgtaaaggtcaatctgaaagcgttcagcttttcgattgaaatagaaaaacaggggatattgtaaaatttatccttgtgaaataataattgactttatttgagttcgtgcctaaacaatgcagatgtgcattttggacaaatatcgttttgctatatgtattacggtaaagctgtatatttgttgtgttaaaaaatattacccgtaatactattctaaaaacatgggatagaaatccgattttgatggggtagtagtgatattttgattatctttgcaattgtcatgaaacatttgcctgattgagtagtatggagccttaaactaataaaaaatatgaatgaacatgtcgtagatgaccttaatagcagattgtcttctaaatcagagtttctccgaagttaagtatggcaagattgacagttatgacacgttaatgagtttggtaaagtaaaaagtaatatatttatggattttcgtctgaaagtatttcacagcgtagccacgaatttgagctttacgaaggcttcaaaagagttgtttatcagtcagccagccatcagcaagcatattcatgaattggaggtgcaatataaaacaccgttgttcgatcgggtgggaagccatatcggactgacccatgcgggtgaattgttgttgtcgcatacgaaacaactgttggctgcataccggcagatggattttgagatgaacctgttgacggataattttgccggggaactgcggttgggggcaagtacgacgatttcccaatatgtgctgccgcctgtcctcgcctcttttatcaagaagttcccggagataaaagtctctttgctgaacgggaatagccgcgatatcgaacaggtcttgcgggagggaaagatcaccctcggcctggtcgaaggaacggcgcaccagagcacgcttcactataccccttttatgagagacgaactggtcgtcgtggcgcatacgggcagttcattggcggcctatgacgagatttcgctcgaacagctccgtacgctgcctcttgtcctgcgcgaaaacggttcgggaacgctggatgtggtggaagctgccctggcggaacatcaggtgaaactttcgcaactgaatgtggtgttgcagatggggagtacggaaagtattaagttgtttttggagaactccgaggtgttgggaattgtttctatccgtgccgtgacccgcgaattgatgtccggcaggctgaaggtgatcgaagtggaggggttccgcgccgaacggatgtttacctttgccgagccgcagggacagaacgggggagtggaagaaagcttcatccgatatgcctgccaaaactggcgataacctgatgttatactctataaaaacatattaggaaaggatagaggaaaaaagccttacttttgccacggttttaaaaaataatggattttaaacttgattgaatatgtttagcgaaaaaaggagtaacgtacttcatggcattctgttgatcgcccttttctcttgttctgctttttacatagcagagtttccctttgtcaaaaatctatccttcagtcctctgatcgtcggtatcctgttgggaatggtatatgcgaacagtttgcgcaaccatctgcctgagacatgggtgcccggtattttgttttgtacgaagcaggtactgcgtgccggtatcgtgttgtatggtttcaggctgacattccagagcgtggccgagatcgggcttccggccatcctgatcgatgcgattatagtggcggctaccatattcataggtttgtttgtcgggcgtttgctgaaaatggataaagatctcgctttgctgacatccaccggtagcgcgatctgtggggctgctgccgtattgggagccgagccggtcgtgaaaagcgagccgcataaaacagcggtggccgtttcgacagtcgttattttcggcactttgtcgatgtttatctatccggccatgtaccgtgcaggcatattggacctgacatctgaacaaatggggctttataccggatcgaccttgcacgaggtggcgcatgtcgtaggtgcaggtaatgttatgggaaaggaaatttcggatacggctattatcgtgaaaatgattcgcgttatgatgctggctcccgtcttggtgatgatgagttttgctttggcgcgtaccgccgtgaaagccgtatctgatagcgtaaaggaaacagcagccgttacagcaaaacggggtaagatcacaatcccgtggtttgctttcggtttcctggctgtgattggttttaattcttttgatctgttgcctcatacagttgtggacgggatcaataatatagatacatttatgttgacgatggccatgacggcattgggtacggaaactagtatcgagaagtttaagaaagccggagcgaaacctttcatcttggcggcagtattgtatatctggttgttaggtggtggctatttgttggcgaagtatttggtttaacataaattgcttgatgctgtggtgagggagtgtcttaataaattattacctttgtgcccaaaacaagaaaaatagagaaaagtggtttcaaaggtaacaaaaggtattataatttcgttctggctgctgtttgcgatagcggtaggtgctgtagttttattgttttcagcaatagccaaaggctcgataggctatatgccaccggtcgaacagcttgaaaacccgattgataaatatgcttcacaggtcgtgtctgctgatgggaaaacactcggtatctatgcgcatagccaggataaccgtatcatggtcaattataacgatctatctcccgatttggtgaaggcgttgatcgcaacggaagatgtccgttttgccgaacatagcggtatcgatgcgcagggactgtttcgtgcagttgttaagagaggcattttgatgcagaaaagtggtggtggtggtagtaccattacgcaacaattggcaaagcaattgttttctccaagtgttgacaatgtgatggaacgtttgttccagaaaccgatcgagtgggtgattgccgtccagcttgaacgttattatacgaaggaagagatcattaatatgtacctgaataagtttgactttctttataatgccgtgggaatccagtctgctgcccgtgtttatttcggaaagacgcccaagacgttgaagatcgaggaagcggcgacacttgtcggaatgtgtaagaatccctcttattttaatcccaggcgccataacgagcggacacgcggacgacgtaatacggttttggaacaaatgcagaaagccggctatataacgcaggcggaatgtgactcgctgaaggctttgccgctcacacttcattttagccgtatggatcataaggaagggttggctccttatttccgcgaatatctgcgcttatttttgacggcgaagaaacctgagcgtaaaaactatcggggatggcagatgcagcagttcaaggaagactcggttgcctgggaaacgaatcctgcatacggttggtgtaacaagaacaaaaaggctgatggagaattctataatttgtatacggatggtttaaaaatatatacgaccattgattcccgtatgcagaaatatgctgaggatgccgtccgtgagcatatcggaggttatcttcaacctgcattttttaaagagaagagaggaaaaagttatgctccgttctcccgtgatttacgtcaaagcgaggttgatacgatctttatgcatgctatgcaccagacagatcggtaccgtgccatgaagaaggcgggagcgagtgagaaagagataaaggctgcctttaacgaaccggtcgagatgcgtgtgttcagttggggaggtgctatagacacgacgatgtctccgttggattcgatccgctatcataagagtttcctgcgtaccggcttcatgtcgatggatccgcgcaccggtcatgtgaaagcctatgtgggtggtatcgattataatgatttccagtatgatatggtgaatggaggccgtcgccagatcggttccactattaaaccttacctctattcccttgcaatgattgaaggtatcagtccgtgtgacgagatgttgcacgtgcaacaacgcctgaccgatgagaacggacggctttgggaaccccgtaactcgaataagaaacggatcggtgagatggtttctgtacagtggggattgcagaattccgacaactgggtgacggcttggttgatgagccaattgtctccctatacgtttgttcgtctgctgcattcgttcggattaaagaacgaaatggatcctgtagtttcgatttgtttggggactccagatgtctcggttggtgagatggtaagcggttatacgacttttgccaacaaaggcatacgagtcgaacctttgtatgtgacccgaatagaggatccttacggcaatacgattgcgaatttcaattcgcagatgagtgaagtattgacggaagatgcttcttataagatgctccacatgttgaaaaatgtgatagacggtggtactggtggtcgtattcgtgcccgttatggcatcaaagcgccgatgggaggaaagaccggtacgactcagaataactccgacggttggtttatgggttttacgccgagcttggtatccggtgtctgggtcggcggtgaagatcgttctatccatttcgaccggatgtcggaaggacagggagctagtatggctctgccaatctatggactttacatgcagaaagtttatgccgacaaaacgttgggctattcgcaggaagaggatttcgacattcccgaacagtatcagaatccttgtaaaatggccaccgaagaggaacgaaaacagacaccggcagatgtgggtggcattgataagatgtttgaataagaaacaggcttgcttttaagtgcaataaaaaatgcgtggttatggaattttcattttatggccatgcatttttttattatatccgtgtgtttctttttcatgacggtggaaccataatcggaatttatttgttagatttgtatgtgttaacttttcatgatatgggatatggaacggggaaaagataaaacatggcagaccgtccggttgaaagactttaaccgggtagttcccattatattaaaataatctaatgagacgaaagatatgaatttcagaaataaatatgtgctggctatcgaccagggcacgacctcttcgagagccatccttttcagccatcagggcaatatcatcacactagcgcagaaaacattccagcagtatttccctaagcctggctgggtggaacatgacccgaacgagatttggtacacacaatcgtctgccatcaaggaggctatggctaaagcggatgtgacggatatgcatattgcctgtatcggtattgccaaccagcgtgaaacgacgataatatgggaccgggagaccggcttccctgtctataacgccattgtttggcaggacagacgtacggcagactattgcgaagaattgaaaacaaaggggtatgcctctctgatccagcagaagaccggattggtgatcgatgcttatttttctgctacgaagatacgttggattcttgatcatgtgaagggtgtccgggaacgtgccgagcgtggggagctttgtttcggtacggtcgattcctggttggtttggaaactgacccgcggaaccgaatttattacggatattacgaatgcctcccgtacgatgttgttcaatatccatacgcaggaatgggataaggaactgcttgaccttttccaaattccggcatccatgatgccggaagtgaaaagtagtagcgaagtgtattgcgagacttccaccccgatatttaagaccggtatcccggtttcgggaatggccggtgatcagcaagccgccctgttcggacaattgtgtacggatatcggtatgattaaaacgacttacggaacaggatgctttatgattctgaatactggaagcaagcctgttttatctaaaaataatttgttgacgactattgcctggaaactggacgggaaagtgacgtatgcgttggaaggaagtgtttttgtcggtggtgcggtcgttcaatggttgcgtgacgagttaggattgatacagagtgccgctatcacggagcagctggccaattccgtgccggataacggaggtgtctattttgttccggcgctgaccgggttgggagctccttactgggaccagtatgcccgtggagtcatcatcggaatcacgcggggaacaagtacagcccatctgacccgtgccgccttggaaggtatttgctatcaggtctacgatgtcttggtagctatggaaaacgatatacatgccaagccgaaagagatccgtgtggatggtggagcgattgctaataacttcctgatgcaattccaggcggatatctgtcgttgtccggtggttcgtcctcgtgtccttgaaacaacggctttgggtgccgcctatctggcagggttggcgatcggttactggaaagatgtggatgaactgaaagaacagtggtccttggataatatctttagtgctgaaatgcatgaagaaacagccgagactttgcttaccgaatggcataaagcggtcggtaggagcttgaattgggctgcggattagttgtatgaatagtctataatatataccatgaatttacgaaataaagtctctttttttctactctcttttgttgcggttccattgtttgcacagacaccgcaacaggaattggaacggcttcaacaaaactatatccagtcttttatatcgaatgacgaccggatggcttcattggtggaactcttgtcaggcatacagcctgaaacggaaatatccgatcaggttgtcgttgaactccaccagcgttatcctttcaacgtggagaaaatagcgggatatatggaaacgatccgagaagacggttcctggccggatattaactataacgaccagaaacgatcgggctggtctgtcaaggaacatgccgaccgggtgctggaactagccaagctgtacagggctgaagagggcgattgtcattggggaccgaagctcgaatcggtcattcacctggcattgggctactggttccgggagaaaccggtctgtaagaactggtggtataaccagatcggtgttcccaagacattgggaccagctttcctcctaatgaaagaacaattgaacccggaggaaaaggaagccgccatcgaggtgatggaaaatgccaagttcggcatgacaggacagaataaagtctggcttgccgggaatgtgttgatgcgtggactgttgcaggataatttcgaattggtaaaggctgcccgtgatactattgtatccgagattacgactggtatgcaggaagggatcaaaagcgactggagctttcatcagcacggaccgcagcaacaattcggaaactacggattggctttcctgacggagatgagttcttattccggcctgtttgcgggaaccgtttttgccctgaacaaggaacaacagggaattttgaattctttccttctgaacggctatcgttggattgtctggaaagggtatatggatgtcaatgcactggaccggcaattgtttcatagcgggcagatacacaaggcattcagtctggcttttgccacaaatgccctgatgcgtggcagttccgctgaagatatccggcagatgaatgagttcctgaaagataactatgctcccgaaagaaaaggtagtgctttcatcgggcataaacatttctgggattctgatcagaccgttcatcgtttctccacctggatggcttcggtcaagatggcctctgaccgggtgatcggcacggagttggtgaacgaagataatttgaaaggcttttatatgggcgacggtgctctttatacgtactgtcgtggtgacgagtatctgaatatttttcctttctgggactggcggaagattccaggcattaccgcttatgagagcgaggctcccgttcctgcttttttcaattatggggcgcatgtgaggaataagactgcctttgtcggaggtgtgacggatggtgaaaccggaatgacggcaatggtcttggatcgggatggtttgcaggcgcacaagtcctggatctttacccgcgattatgttcttagcttaggtgccgggattcgttcggacagcattttggcggttacgacatctgtagaccagcgggtgaaacggggcgatttgctccgatatgccgatggtaattggttgccggtacagggaaagtatgtttcttctccggaggaacaacgtttcttccatgataacacagggtatattctgttacaaccttccgcctatgtggccatttcggaaaagcgatccgggcgctggtgtgattttatgggatcatatgctcctaaaacggtagaaggagagattgttagtctctatatcgatcatggaagagaggataacgccgattaccaatatttgatccttccagcttctaccgccgaaaaaaccgcagcttttgcagtacaggatatccgggtgatccggaatgacacatccattcaggctgttgctgccggcaactgtttttatgtgacggcgtatgagccgcaggtagtaaacttgcaaaaagacttgcaggtcgatttacagactccgggtatttatatgttccgtctgcataatggaaattggttgatcgaagctgccgatccgacacacaagcaacattccctgtcgctcaaaatgaatgggaaggatgtgaagatcgtcttccctccctgccatgaaccgggaaaaagcatttctgcccaaccgtttatcagtgctcctttttccaaaggaatcaaagtggatggtaaacaagacgactggaaaaacgtctcggctgtaactggtctaatcgctccctgggacggggcggaaaaagacaaaaccgctttttatgcctgtcatgatcaaaagaacctgtatttcctgtatgaggtgtctgatactactttggtttataatgacgagaagacggaggcttctgtcggtaatgaagaccggatcgagttttttatgagcaaggatccggagatgaagacgtattattgtgcggagatcgatccgaaggggaaagtgatggattatgaagcgcataactatcgtaagtttgattttaactggaacttcaaggatctgaagttggcaacttccgtcggcaaagatgcttaccgtgtggaagagagcatttcgttgaagacgctaagaaaattagggttgatttctccggaaggtgaaatccgcatgggtgtttaccgggccgattatttcgacgatgccggggagcgcgtgatctggtcatcctggatcgtccctgatgctgccgaaccggatttccatatcccgtcttctttgggaatattaaaactggagaatttcgtacctttgtcacgactaaaataaaagaaatatgaatagaacgctgataaaaaacgccactatcattaacgaaggccgcaccttcaccggttcggtactgatcgaagatgataagattgccgcagtatatgaagggacaattccggctgagtccggtgatgcgaccgtgatagatgctacaggtaaatacttgcttccgggtgctatcgacgatcaggtgcatttccgtgaaccgggattgacgcataaaggcgatatcgccagcgaaagccgtgctgccgtagccggtggggtgactaccttcatggatatgccgaatacgaagcctcagacgacaactcttgccgatctggaatggaaattgcaacggggagctgaaatgtcggttgctaactattccttcttcttcggcgggacgaacgacaatatggatgaaatccgtaaactggatcgtagccgtgtgccgggtctgaaactctttctcggttcttccaccggtaatatgttggtcgataagaaggatagcctggaacgtattttcggcgaagccgggatgcttatcgctatccatgccgaaaaggaggaggtcatcaaacggaacatcgctcattatacgggcttgcacggtgacgacctggatatctccttccatagtaagatccgtagcgaggaagcctgctatgcttcctcgtccgaggcagttgaactggctacccgtctcggttcccgtctgcatattctgcatctttcgacagcaaaagaactttctttgttgagtaataagcttccgattagtgaaaagaagatcacaggtgaagtatgtgtgcatcatctttggtttcacgatggcgattatgaacagttcggaaaccgtatcaaatggaacccgtcgattaagacgctggcagaccgtacggcactgcgtgaagccgttaataacaacacgatcgatattgtggcgaccgaccatgccccgcatctcctttccgaaaaggagggaagttgcctgaaagccgcttccggaggtccgctgatccagcattcgcttattgttatgctggaattggcgatggaaggccgtttcacttacgaaaaagtggtggaaaagatggctcacatgccttcagaacttttccgcgtggatcgccgtggctatatccgtccaggttattatgccgaccttgtcttggtcgatccgaaagaaacctggacagtggcaaaagaaaatatactgtataaatgcggttggtctcctttcgaaggctatacattccatcatgctgtttggaaaacattcgtcaacgggcaactggcctatgacaatggacgggtgaatgatgaggttcgcgggatggaagctcggtatagttgaaaggtgaaaggtgaaagttaattttacgtctctttataactttcacctttcaactgatatcaataagtttgtgcgtttgcaagctgaggtgccattgggggtggtggaggatgtactctaccacctcttttgtattcaggcaggaacagggttggaggaaatgccaggttgctttcaaaccggcgtattccgttaggtcctgtcctgtatagaccactttgatctcatctatatgtgtcagcctcaagggaaaccctttcggggaacaggtcacccagtcgatgccttccggcaacgggtttgtcccgttagtctcgatgcaaatatattttcctgccatgtgtagcagatcgataaaagtctggtcgatccagagcgaaggttcgcctcctgtcaagataacgacatttgaaggaaaggctgaaatagcttgtaaaatatcttcatcagacatcaagatcccttcctcgtgtcgggtatcacaaaaactgcatttcaggttgcatccggagaagcggacgaaaacggcaggcgtacccgtatggaaaccttctccttggagactgtagaatatctcgttaatctttctcatagattgccgtgtttccttctgattcctgaacttctactttgtagcaggtgggaagctggtcgcatatccaccgggcgatattctcggctgtcgggttaaaagggagcacctcgttgaggttccggtgatcgagctgatcttttacgacctgcttgatatgggtgaaatcgatcaccatgccatctgtgtttaattctttggaacggcaatgcacggtgataatccagttgtgaccatgcagatattcgcatttgctcggataggaaagcgacagactgtgagctgccgaaatctccatacgtttgataacggtatacatacgataaaactgttttagaatattatgcctgcacctaatgtcacctcagtacaaggtgcaaatttactgaaaaaatcgggttccgaagcggtacttaatgtattgaaatattaaaaatatctgtaactgtttgtatgtatttaaaacaaagatcaagggaggatctatcgtaaaaatgaacttttttgttgtgaaataaaaatattatgtattaatttgcttcataatcaaagatatgaggtggttttaatgtctctgaaccagtatttcggcagcagtcctatattgttaaaaaatagaagaagctgcaaataagtttcgataatcttaaaaatgtgttttataatatctttttttatttgttcagtaatttaaaatgcctcatctttgcaagcagataacctaaacaatctttttgccttaaagactaatacctattaaaacctataaagaggacctttgagaaaaggtcctctttatgatttttagagggttactcttccgtttcttctatttttgacgatattttcccaatcgcatcattgagtttttcttcaggtgggatcatgttgaagttgccccagaacttttcatcgtaagtaaatcgggtttccgcaaagattgtccgtgtcggtaatgcttcgctacgggcaaagcggcttactcggttcgtgtctattttgcaggtaaccatctcgaaccaggtatgcagcgggaaagttccgaacagttgtttccttttctttatcctgaaaaagaggtcgcctcggacatggttgatgtaatattggccgttgtaaggtttgtatgttacggtatagatcactttttggggagtgatctttaggttgcgactctttttctccaccagcatcccggtagcctgtttaatgtatttggggttgatttcgaagtgggcgcggagcaatgcgttgttttccgtgtcgatatacagttctccccggtaaagggcggagttgatgtttcctttttgttcgaaatagatcacatgggctaaccggtcgtcgatcacggcgatatcggaagatgcatacatataagactctatcttttcatctgtcagaaggaagtcaggcaattcttttatcaagtccaggctcaggctggcgttgattcccgacttcatccgggcgatgatcgtgtctttttcctgctggctgatgatccggcgcattttgagcagtttgacctggtccggtgccggattgggcttgtaggccgatttgtaaattttgaatacagcttccgtcaatcctacgaatttattttttcgttcgattccttcccggtagaaagtagtcaggtaagcgggtgattgcgggtagtttttccggatgttttctttcatgtctcgaagcaggcggagtgggttgacgatgcgcactacgacttcttggatcgggattattttggcatcgagcgtgatcaccgtgtgttgtccggcgagaagagaggcctctatcttgcggggttcgtagcctaagtgggagaagtagagcgtagaccggcgaagcgagtcgggcagcgtgagccggaactccccgtttgcattggtgatgctgccgattgaagtagcaaggactcctatagtgcccgccttgatcggttcattcgtctgttggtcttgtaggattcctttgacaataaaatagttgtctgcctctttcggaggaatggtctcgggaatggctgtttgcctggcaggttgcggcccggagatcaggatgtgatcgcctatcacacgcaagctcagttctttgtttcctgtgatcaggtaaattgcctgccggatggtgtagtctcctttcgggatgcgtaccgttttttcattatcgatcagcttgctgtcatagataaagagaaagccggtttgttccgatactttgtcaagcaggcggtagacggtatttttttctttggataagtgaatcatgcgggccaaaacatcatcgcctccctctgcgcataacaggcctgtcggaagcaaaagcatccaaaagcacagacagagaaggcgaaaaatctgaatcattagcttcactatataaataacatttaattgtcaattgaataaaaggatcatgttgtcctgtcgtgttttcttcaaatcgagggcaaggcagatcagttcagccatcgcttcgggtgtatcattggagaaggtgacggtaagcgtccggttccatagctctggtgtcgtttccaaccggatatccggattttgcagattgatcacccgcaggatattgcctaatttttcgtctttgaacctgattcgtttggtatagcggtcgaatagtgccggatcgggcgtcatgctcaattgcagtcttcgggagaggagcgtgacggtttccccggcttttacatggatgtcctgtccgtccttcttcaacgtcacttttacttcccctcgctgtacagacagttcgaaaggagtgctatcgttacttttcacattgaaggccgtccctaacacttcgatacgtgtatcttcggtttcaattatgaacggccgcttgtggttgccggctacatcgaacagggcattcccttgcaagctcacttcccgtcggtcggatgagaaatgttcaggaaacttcaatgaagtatttcctgccaggtagaccacggaaccatcctcaagggtggttaccaatgtcgttgccgtctcactgttctgacgggtgagcaggttcggatcggtatcctgcccagacctgttcaggtaggtgacagagataagcaggcaaagaagggcgacggcagcagcggctactcctcttttccatgcagggcttctgaatggcgaagccggtctgcccgaaagcaaaccttcttcatccagacgttggtacaacgtattccaggcccggtctgtttttcttttatttctttctgtttcaatcatatttcatgtaaatctctaattcgtctcgtagtgttcggagtgctttcgtcatttcggcctcgactgttttgactgaaagggagaggttggatgcgatttccgcatatttctttccttcgaaacgatgcatccggaatatgcggagacgacgttcgggaagcttttcgagtgtccggtttaccagagcttccagttccttgtattcgatctgctcctgtgggtcgtccggtgtgtcgtctttatccgggtgggagaggatggcatcccgataacggttgcgtacatcctggtgttcccagtactggagggattggttacgcacggccccatacaaatagctttttatcgtatgaaacaattgtaaccgttccctttccttccaaaacacatagaataattcttgtacgatctcttccgcaatatccattcttccggttatgctggctgcaaacatacaaagaggcatataatacagacggaatacttgttcaaaagctttgacgtctccatttttgatctttgtaagtgtaagcaggtctttcatgtttaataattattcaatgtgccaattgagaaatgttgctaatttatacattaatctgctcattggcaaattggcacattacctatgttgcttcttcagtttgttgacagcgtgttccaatgattctgtcggctcgatgatattgtaggaaccccagaaaccttcatcggcaaaattggaaaccttgtccgataaggactggctggatctgaatgccatcttgtagggaatagtgtttatgccgctttccttgccatctgttacgaccatctccgaaaggatggtgtaattggttgagaacaatttgcgtttccagtcgcatttgaagcggacgccgttacggatgtagctcagataagtcagcccattgcgttccttgtagttgaccaggaacgagacttcgaccggtttgaaccgtaacccgaacggctttttccggaggatcgcctgcgtggccttgttgtggtcgttcatgtcgagaaagaattcggcccgcgtgaaagagagccgttccttgtcgatgtatagttttccataataaagcgcatacggtaatatggcttgcggctcgaaattgataacgtattgtggccggtcgttgatcgttgtcgattcttccatccgaaatttatagtaaggcaggctttccaggtcgagcagtacatccggattcttcaccacgtccacatagacggacaggttcgggcctcccagcagtttgacggccaatgtgtcgctcgctttctggctgagcagcttgcgccctttgaatatctgtacgcgatcgcggtctactccctcgtcataaggagtcttgtagatatcgatcaccgcttccgagatgttgatataccggcgccctttctgggccgtttcacgatagaatccggtcaggaggctatgcttcgaactgtagttggccggaatctttttgattgcttcttccaccaagtaacgaggatcgcgggcatggatgataacttcgtcgagcatattcgtgtagggggtcagccacacggtctgttcttccacatccttgccgttgagttctattttactgttgaaatatccgaggtgcgaaatctccacttctttggcatggatggaatcttttaccttgaaagaaaactcaccgtcggcgttcgtgaccgtgccggtcgtactgcccggaatagaaatattgacatattccaggctctttttgctctttttgtcttttacgataccactgagcgtgatgtaccccccttcgtcagccgaatccgtttgtgcctgtaaaggcgtgaatcccgccagcgacagtgtaatgagcaagtatccccatagttgtttatgcatcgctttcatatctcatatagtttaataagtaaatactcgtgcttgtattactaagatggttcagccggcaaataccctatgcttcgtccctggatttttttattatgatggacatagtttgaaaatttgactatttttgcgcaggttatactaagatgagacgatgacagagcaggagataaggaaatatttaaggcggatcgaagaagagaattcccagactgctctgcgtagcttttataatctttgcttcgaccgtttctttcgtattgcctactactatctgcatacggaagagtgggcacaggaggtcgtcctcgatgtattcctgaaaatatgggaacgccgcgagtctttgcaccatatagccaatttggaagattatttctttatcacgataaaaaatgcctctctgaactatctcgaaaaggaacaacgccggaaagacatgacggcggatgcttttgacggtgtgtccatctccggtgaatcgccggaagacatcttggtcagtgaggaactttttgcccactatgtcaaggccctcgatcgcctgccggagcgatgtcgtgaaatatttatccgtgtacgtgaagaaaagcagtcttatgccgaggtagcgaaagacttgggcataagcgtcaatacggtcgatgtacagttacagaaagcgatcgggcggatgtgggatatgttgtcgcgttatataagcggaaccgaaaattgagacagttggagtgatgtccgtgagcaatacgagaccttgttgcgtacgcgcccggaccttttccaacgggtcccgttgaagcatattgctttattcctgcaaattaccccgcagtcgcttagccggatacgcgcctctgtgaaataacatttgttttttacacgtttatcatttagtaagtagagtctgtattttgcctggcgggtagaaaggtgaaaaaatatattacccgcaaatgttgtttcaaaatgcatgtcttatataatcctatttacatggggtggtcttgacatttttgatacacggtcatttctgtatgttgtgcagcgtttcttttttccaaagcatcttatctataatggggattattggacgatgaagctgtccggatggttaaagtatatataaatgcttggaaactatttggaaacagctatatttgtgaataaaatggacagttttattagtgaggcagaaagggtattaaacctaccccccttgtatttagtctaaagagtagaaatattataaagtagaggagaaacgaatatgaaacccatgaaattaacatctttgatggtgatgcttctggtaggcttcagtgccgcagcccaggaggagttctttgatgatgtgtatttctcttccagcaaaaaagataaaaaagaaaaaacagaagagaaggtcatacaacctaaagaggatgctgaacgtactacgatgacgtctacatacagcaccagcaaaagaaaaagtgctgtgtctgatgaagaacgagatgtagatgaatataaccgtcgctatacttcggttgacgtggaggagccgtatgatgaagattcagacggtgaagtcttggccgaatataacgacgatatggataatgaaaaaacagtcgcttccgattctaaaaaggaacgtcgttcggatacggaatataccgagcgtatcatccgttaccattcgccgagcaagattacgattgccggagcagaccaagtcgatctgtatctgagtgacggatattatgcttatggctacgatacggattattccaacggcagtaccaacgtaagtgtcaatgtgaacatcggaaatggctggggcggttactatgatccgtggtacagcggatggtatggtggctggtacggcggttggtatgatccttggatttacagcccggcccgctattggggctacggtccatccttcggtttcggctggggttggggtggtttctatgccggctactggggcccgtcttggggctggggtccgagttattggggacctggttattggggtggcggctactggggtggctattggggacatcatcaccatcattatcaaccgaattattatcggaatgagacaggaagacgttcttcctatgcaagcaattatagaggaagtggtgggcgaagcagtagttcgacctatcgttctggtacgcgtaatcgctataacggatccgttacttcgctaaggggggataacagcagcattgcggcgcctaaccgcagtacccgctccggacgtccggcttcttcagaaggcacgtccctccgtaacaactctgtttcaacacgaccttcatctgttggcactacgacgagaacccgtgtgaatcgtcggaatgattcgggcacaatcggctcttcttcccgatcccgtatttcgggttcgtcaagtcgtcagcaattgtacgcgccttcgagaagcagcaaccggagcagcatcgacaatggcaacagccgctcttatcagtcacgaagccagaatagttatagcccttctcggagtacttatgctccttcgagaagtagtggtggcagcaaccgttcgggctccttcggtggaggtagcagccgttcgggaggtggtagcagcagaagcggcgggcgtcgataaggataggaatgtttggcgaagtaagaaatagtagggggcagttttgcccctttctctataaagtatgatttatataaagaaaaagtgatgaatagaatagcatgcttattagtttctgcatccctgttgagcagtggcgttgtatttgcacaaggagagttggatgcctacaggtattctcaaacggagttgaatggtactgcacgttatttgggcatgggaggcgcttttggcgcattgggcggagatatttcgtccatgtcgtctaatccggcaggtttaggaatctatcgtagttcagaaattgttactacattgagtctgtcttcgatcaaggcaaaatcggattggggcggttcgaaggtggatgcgaataagacgaagtttaattttgataacattgcttatgtcggatattttcctactggaaacgatgaaggtttgatcgggtggaatgtcggtttttcctacaatcgggtgaaaaatttcaatcgtaattatcgtttgcgtggcactcaaaattactcattggctgattatgcagcagctaaggcgtcttatgccggaacggatcggaatagcggtgaatggtttggtattccagaaaatgaaatgcctccgttcggtgtggtcaacaacgaatcagatttggtatatgataagttaggtgcttataatggtggatggttgtcgggattggcttatcaatcggggatgatcggtgcaaatcaggcaaacgtgaatgatacctattatcactctgcttttgcagaatgggatcagaacaatcagaattggtattcagacagtcgtccggatgatgtcggtttagatgtgagtgaaagtggcgctattgaccagtatgacttttcgtttgcaaccaatatttcgaatcgggttttcatcggtgcgacgattgcggtgacagatttgaattaccgtatgtcttccagttattttgaaaattatctctatacggataacagtatggattatttggattggggcaatactttgagagtggatggtacgggatattcatttaatttgggtgttatcgtgcgtcctgccgattatctgcgtttaggggttgcctataattctcccatctggtataagatgacagactcttattggggatatgccgatacgcataatgaaaactatccggaggatccggatgtaagtggagagactcctgccagcccgtatccttatacgaattataaacttcgtacagcagacaagtggatttttagtgtggctggtattatcgggcagacagcattgatcagtttggattatgaattaggaaattataaatatatgaagctttccgatccgtatggatatgagcattatgaagctttgaaccatgatttgatccagaaggatttcggtttggcccatacgttgaaactgggggcggaagtgaaaatcactcctcaattcgctgttcgtgccggtgctaactggcggacaagtccgatgaaaaaggagtttagagaaggggcttttgaggtatttccggcagggacagtggcccattacactttggataaaggaacaatttcctattcggtggggttaggatatcgtttcactcctaacttttatatggatttggcctgtgtatatcgccaatataaggaagatgcttatacgttttctaaagttattatagaagataataatggtcttcacacgcttgtcgattcagaagcgatcggtctgaaaacaaacacaacccaggttgctcttacgttaggttataagttttaataaatataggtgttaggtgaatcctctatccgtgtaactttttacggatagaggattttttataaaaaaactaagattttcttttaatcggctgattgataaagcgtaaagagcgataagcctggtaattggtagcgatttggtagcggtgctaatttcagtgcattgctttgcttcacttttagaactgatacaaatatactaattttgaccgaaaaagaaaaaaacaggagatttttagttttctgtgtaaacggaaaaacaagaaaagtgtaagtaacagaataagtgcaaaaaaggatttgcacctattcttgttactaaaaatgtaaatcattgatttttaggatgtaattcattggtgcaaggtgcagctatatctgtatatagctgcaccttgcaccaatgaattatcttgtcctagaaaaactttacagattatattactttgtcctatatgagcttgacattatcaggaattgagtgttttagtcctgctgtgcctttacacttcggttcaaagatagagacttcttcattaagtacattcctctttcgataataattcttccatttgcgttccgttttaatatttgtttgatgaaccaaggcaggaaccatataactgatactctgatgcggtctttgattattatataaatcaataattcgactaatgaagttaatagtttcctgccatgattttagcttaacatcgtatatccattctgttttcagaatgccatttattctttctgctattgcattttcaagtggatcgccactttccgtcatgctaatttgtaccttatgctgcgttagcaaattaacataactggcgctgcaatattggcttcctctgtctgaatgatgaataagcccggaatatccttccggtaaactatttaaagccattttcaaggcagcaagagcattgcaagcacgaagtgatggagcaagctcccaaccaacgatcttatgagaataggcatctgttacaagtgctagataagcaaaacaccctgccatctcaatataagtaatgtcgcttacccataattgattgggagcctttggtatataatcccttatcaaattggggtatttacgcatccaatgattggaaaaagtcgtttttctcttacttctcaccctgacttgtcctaaaataaccttacagctcctctctatttctcttattatactttgacacattacatgaaacatagaaatttgccataatcatctcctttgtaatataaatctaaggtatttttatttgatgtatttatcttattgtataatattttgtttatatattccaaactattaggccatattgataaattatagggctaaaatgataatcaataatattttatcttgttttttctttgcacaatgaataatgggctgcgtattatattcaataaatatattgttgttaattagataatttgtttgccttagatgattaatattcttcttggcaagatttatagatatattatttttatcaattattgttgtaaatataaatatgaaaagtaaattcacattatggagtgttgtattgctcttggccggatttatatttgtaggatgtgacaatgaacgaacggaaaacgcatctgattttcagacaggaattcataaaattgtaatccaacagtccggtgacacagattcatttgaagtgagtgtaagtatcggtggtgctgacaagggtggtcccgccaagttgtacaatgacaagggagaatacattggtgattcctattctgcccaaataaggacggcagctatgtcttgtcgtacaaatgggaatgcgtttttcatgacctgtgccggttcggtttccagtatctcggaggcgggtaaacggcttcatataacagtaataggctacattgacgacaaggaggttaaccgtttggaaaaagaatatataacagatggtaatacccttattgaaactttcagcgtttcaaccaaggagatatgatccgggtagaatacagaacttgtattgaaaagagcataacgcctgaacatgtttcttatcgaactttttttcctaactaaataatttatgaatacacttcaaaaaacagcgggagcaattctgtcgctctcgctattgtgtgggatgcaggtttatgcgttccctgactacccttccctgaggggacaaattatcgaacagagtgatatctgtcaaggagttgtcaaagatgccaatggcgaaagcattatcggcgcatccgtacttgtcaaagggacgacaaacggcagcattacgggacttgacggtgatttttcccttaggaacgtaaaaaaaggggatataattgttgtttcttatgtcggctatcagagccaggaaatagcctggacaggtgaaccgttaaacatcgttttgaaggaagatgccgaagtgcttgacgaggtggttgttattggctatggtgctgtaagaaaagcggatatggccggttccgtagccgtgctggacaacaaaaatttcaaggaccagcctataacccaggttgcagacgctcttcaggggcgtgtcagtggcgttcatgttgagaacagcggcgtccccgggggaagcgtgaaaatccgcatccgcggtgctaactccatcagcaaaagcaacgaccctttgtatgtggttgacggaatcgtccgcgaaagcggtttggatggtatcaatcccgaggacatccgttcgatgcaggttctcaaagatgcatcgtccactgccatatacggttccagggggtcgaacggggtcgttctgatcactaccaagagtggtaaggccggtgtgcgtgaaattatgttcgacgcatcagtgggagtttccaatgtatataagagatacgatatccttggagcatacgattacgctctggcgctcaaggagatcaaaggtattgatttctcaaacgaagagatgcaatcctatcagaacggaacggcgggcatcgactggcaggatgagattttccgtacggggatcacccagaattacaagttggctctttccaatggtagtgagaagacccaatattacatttccgccaactacatgagccaggaaggtgtggtcattgaatcgaagaacgagcgttatcaggcgaaggcgaatctttcctcacagcttaccgactggctgcatatcacggctgacatcaatgcttcccacggtgtgcgtcgcgggggatcttttgcctccggtaaggataatccgatctggattgctttgaactattcgcctaccatgacgatgatggccgaaaacgggaactataacaccgatacttataattccatagcttccaacccggtcggtatcctaaagttgcagtcgggagagacaatgaccaatgttttcaacggacgtgttgatttgcgccttgatataatgaaggggctaacattcaccacaaccaatggcgtggactattatgacgggaaaagttatagtttcagctccaaacgagtggggaccaagagtggtatgggcaacaatgacacttaccgcctgatgctgcagagttccaacaacctgacatatacgggttcctggaacgaccatcatctgacagccacggccgtatatgaggtgacctcctccgaaaccaggacaatgggtataaccggtaacaacctgctgaccgagggtgtgggctggtggaatgtgggtatggcttcctctcgtgatgcaaacaatggttacgagcaatgggcgttgatgtcgggagtggcccgtgtcatgtacaattataaggatcgttatatgcttaccggaacatttcgtgccgacggttcttctcgctttgccaaaaagaaatgggggtactttccttctattgccgcagcttggacgttaagcaatgaggatttcatgaaggatgtttcctcggttcaggacattaaacttcgcgccagttatggtattgtgggtagccaggctatcagtccttacgcgaccatgggccttatgagtgctactgcatacaattttggaaccaacagtaattttaccggttattgggcaaatgacatagcgactcctgagcttacgtgggagaagaccaaacagttcgacctgggcttggagttctccctgtttgacaggcggctgaatttcagtgtggactatttctataaacgcactacagatgcgttgcttaaaagaagtatccccggatatgtcggcggtaactctttttgggtgaatgacggcgaaatcagtaatcgtggtattgatttgagcgtgaccgcccggattatgcagaatgaccggttccaatggacctccaccttgaacggtacttatttgaagaaccgcgtggaacgcctttccggtggtgagaatgatttcatcaacggctccagtccggctgccggtatggttgattatgccaccattatcaagccgggtgaggccatcggtactttttggggatatgaatggaccggcttggatgaaaagggacatgacacctacacggatgtagatggcaatcagatgatagacggtggcgaccgcaaggtcatcggcaaggccaatcccgatttcaccctgggatggaacaactccctgtcttataaaaactgggatctgaacctgttcttcaacggatctttcggagccaagcgtttgaatcttgtaagatatacgatggcttcggccgaagggaattcccgctttgtaactctggcagacgcctatctgaagggattcgacaagattggctcttcggcaacatacccgagcctgaccgaaggtggaaataatctgcagccggtttcaaccaaatggctggagaacgcggacttccttcgtctggagaatatcagtctttcatacactttccccaaaaagacaacgggattcgctgatttgcggcttactttcagctgtcagaacctttttacaataaccgggtacaaggggatggatccggccggtactaccttctcgaacagcagcgttgacgttgacgcgggtattgacatgggagcctatccttccccaagaacattcacattcggtctccggatgaatttttaaatctaaaatagaagaacttatgaaaataaaaataatagcaggcactatggttgctctgtcattttcactgatgtcgtgcagtgatttcttaacggaagatcccaggggaaaactcactccggaaaacttcttctctacccaggatgaattgaacatgagcatatatgccctttaccagaaagtcaatctttcacaggtatatacgaacatgcagctgccccagtggcagggggatgatataacgaccaatccggggagcaacaaacagcctgccgcagaaatggacaagtttgccgcagcaaacaacaacaagggtgtcaaagatgcgtggaacatgcattatgccattgtaaaggctgccaatttgatcatacagggggcctctaaaacacctaccactcaagatgagataaatatcgccctcgggcaggctaaattctggagggcatacgcttattttaccctggtgcgactttggggaccgctgccgatgaatctggacaatgtcaacgatgattataccaaacctctatcccccgtggaagaagtgtatggtcatattgtgcaggacctgaccgaagctgaggccgtattgcctacgggttacagtggcagcccccgctttctgaacggagtgaatgtgtatgtaacccggcaggcagccaaatctactttggcagcagtgtatatggctatggccggctggccgatgaacaaaacggaatattacgcaaaggctgctgaaaaggcgaaggaggtcattgagggtgtgaacagaggtgaatacgagtataagctcgataaggattacaaagatgtgtatgctatgagcaataactataataatgagacggtgctcggcataaattattcaccgttcgtggattgggcacaggattcggagcttacttcatgtaaccagtttgaatcgctgggcggctggggagacgcctggggtgaaattcgtttctggaaggagtttcctgacggtccgagaaaagatgcgacttatgatcccaagattcgtctgaaagacggaacgttggttgactggtgggagttgaaggaggacggtacccctgtcgttccggaacatcaccccatgttcagtatattctccgtcaactgggatcctgcgtcaaaagtgaataccagtgccccgtatgattatacaaaaccggccagtcagaacatgtgtaatgaccatcggcatagaatcattcgttattcggaggttttgttgtggtatgcggaagctaaggccaggacggggcagacggacgagttggcattcaagtgtctgaatgatgttcgcgagcgtgccggactggaaccgctcaccggactttctgcagatgaccttgccgaagcggcttataaggagcatggttgggaggtggcaggctactgggtggcccttgtcacacgccgtgcggaccagttccgtatgaacagactgaaagacacctttaaggaaagagcggagaacacggctgttgaagtcgccgacgggatcttggtaaaggagtctgtagaatatacgaacaggacatggagtgacaatctgatgtatcttccatatcctgatatggattcccagaaaaacccgaatctggtaaggtgattttttattttaagccagagggcacccgccaatcaccagttgattggcgggtagctcctctgattttcaatgtataattttttaatatcatgtactaaattttgaattgttttttccgtgttctctgctcctgcctttccggtcatatgttttcggaaagaagggtatgtgacctgcacgtgacttttgagctgataggggaatggggtgtggagatcgttcccgtggcattattgttcattcttatgtttttctcccttttggaaactcaggaggtatcattcccgtccccattgatatccatgtttgcggatagtcatttgtaacgtgcttgcggcatgataatgccggaaatcatggacaaacgcataataggtacacattcgatttttagtaataacggattggaatcatgaacattctgaagttacaaggattggacggtcggctttttgaccttgtcgcgcctttggtaatgaacccggccgtattgcggcaaaataataattaccctttcaaaacgacgcgtaaccatgtctggtacattgccatggatgagcaaagggtgttgggattcatgcctgtgaaaatgactttgacaaacaattgcatagataactactatattagcggggataactcctctgtaatagaggtgttattggaccgtattatccatgatttttcttctgatggttcccttgtggccgttgtacacgaacgccacgtggaagacttttcaatgaagaattttatcccctgtgtcgagtggaagaagtatgtcaagatgcgttatcatgaaggaggtggggcatgatgcgccggatggatgtccacgaggccgccaaccggagattgaagatcatctttgactattttgattacgtgtatgtctctttttccggtggcaaggatagcggtatccttctccatttgtgcatggattatatccgcatgcatgcacccggtagaaaactgggtgtgttccacatggattacgaggtgcagtaccgccagagcacggagtacgtggaaaggatgttttccaacaaccgggatatccttgaagtgttccactgttgtgtccccttcaaggtacccacatgtacttccatgtaccagcagtactggcgtccctggcaagaggggtaccagaatatctgggttcgccagatgccgggcaccgctcttagcgtgaaagattttgatttctggaacgacagcctgtgggattacgacttccagtctcttttcccttcctggatacgtcgtaagaagggatgcaagcgtgtttgctgcctcgtggggatccgcacgcaggagagcttcaaccggtggcgggcgattcattccgacaagaattaccgtaagctggccaactacaagtggactcaccgtgtaggatattacacttataacgcctacccgatatacgactggaagacaacggacgtgtggacggggtatgcccggtatggttgggattataaccgtttgtatgacttgtattaccaggccgggattcccttgtcccgccagagggtggccagcccgtttatctcacaggccgtttcgaccctgcatctttataaagttattgatccggatacctggggacgcatggtcagccgggtcaacggcgtcagtttcgccggaatgtacgggaacacggttgcgatgggctggcgctccatcagttgtccggacgggttcacgtggaaagagtacatgtacttcctccttgacacgcttccccgggcgacaagggagaactacctggagaaactgagggtgagccagaaattctggagagaaaaaggaggctgcctgggagaggaaacgatcgggaagctgcgtgcggccggtgtaccgttcacggtggaagaatgcacggcataccggactgacaagaggcccgtccgcatggagtatatagacgagatagatatccctgaatttcgtgaaatacccacttacaaacgaatgtgcgtctgcatcctgaaaaacgatcatacctgcaagtatatgggtttcacgcagaccaagcgggagagggagatgaaagagagagttttgaaaagatataaattgtgattgtcatgtcaagttttaaaagtccggcgtataacgtcaaggccgtgccagtcgagaaaatcgtggccaacagctataacccgaatgtcgttgctcccccggagatgaaactgttggaactgtccatctgggaagacggctacacgatgcccctcgtgtgttattaccgggaagaagaggatatctacgagctggttgacggttaccaccgctatctggttatgaaaacatccgtcaggatttacaagcgcgagaacggattgctgcctgtaacggtcataaacaaagacatctcgaacaggatggcctcgactatccgtcataacagggccaggggaatgcactcgctggaacttatgacaggtattgtggcggaactgtcaaaatcgggtatgtccgacagctggatcatgcgcaacataggcatggacaagaacgagttactccgtttcaaacaaatctcaggtctggctgaattgtttcgtgacaggagtttcgggctctcagacgactggttggaggaataaaacggtctgtctggtatccgtaacaaatatacatggtgtttatgcttgcaaatcattatttgtaggtattgcgagtgatgattaaaaccattaattttgcaaactaatggatcgtacgaaaaaaagacagagacagcgggctgtcatagcatgtatgttgttgctgacattgatgccctttttcctcgtgaaagcttttcatgttcacggggaacattcgtgcgtatcccataacgaacaggggcactcccgtcacgattctcctgaaaattgtaccatctgtctctttacgctctccccgtttgtcgaggcagggatttttatatacgattatattccgactggcaggcctgtaaggtatcttatctccggggaaacagatgtcatcgtcattcttttcccgcatttcctccgtgcaccccctgtgtgtttgtcataactcccttgagggattcgcatgccatcactgtgattgcgtgcaggggcttttcatgtcctgtcttaacagattataacccgtttatattttttcaagtatgacatttcatgcatatctccagtatgcgtgcctgcttgttgtctgcctatgtaccctcccttctcccatggaagcacgggtacaggctgaccggcaatcgacgggtacacgcgatactctgctggtcattgaccaggaaagcgggcttcccattgaaggggcctatatcctgaccggggaacggttacttgtcagctccccccgtggaatgattgttttcggtcatggaacgtgtttcatggatacggtcctcgtgcagtgcctgggttacggttcccggcgtgtgcctttgaacgaggtattcaaagaaagtagcatacataccgtatgtctctccccggacatacaaaaactcggggaagtggtcgtgaccggtgaacgcgccggggcgtcacccaacgtggtgagccggcgcctttcatctcccgagatcaggaacgcgctgggaacctcgcttgccaccctgctcgaacgtgtcagcggggtaagttccatcagcacgggaaccactgtatccaaacccgttatccaaggaatgtacgggaaccggatactgatcatccataacggtgcccgccagaccgggcagcaatggggggccgaccacgctcccgaagtggacatgaacggcagctcctctgtttcggtaatcaagggctccgatgcggtaagatacggttcggatgcccttggagggattatcgtcatggagcagtctccgcttcctttcagaaaacgctcccttcaagggggaatctccgcactttacggaagtaacgggcgtcgctacgtggctaccggacagctcgaaggtgcttttcccggtgatttcgcttggcgtctgcagggaacctggtcaaattccggggaccgttccactgcgcactatcttctgaacaacacgggaaccagagagtatcacgcttccgcctctctgggctatgaccgcggacgtctgagagtggaaggtttctacagccgcttctacagccggacaggggtgatgctcagcgcccagatgggtagcgaggacctgctggcggaacgtatccggcttggtcgccccctgcatacggatcccttctcccgtggtatcaggcctccctgccaggaggtcacccatcagatcgcattcggcaggatgcggctcggcatgaagaaggggggaagtattcactggcagagtacctggcagaaggacgataggcaggaaaaccgtgtccggcggctggattctaacattccggcggtttccctgcacctgaattcattccagcatcttctgcgctggaagcgggattaccgctcctggcaggtcgaggcgggaggtcaggtcatgttcatcgagaaccacagccgcgcgggtaccggattcgtgcccgttatcccgaactacacggagacacaggcagggatatacggaatcgggaaatatcatctggccaggggaggcgttgaagcaggcctccgcctggatatgcaggaaacccgtgccagtggttatgactggacgggaagcccctatggcgggacaagaaagtttaacaacgtgtcctacagcctgggaggacactatcaactttccagacgctggaggctcacctctaacttcggtctggcttggcgtgcccctcacgtgtatgaactgtacagcaacgggaacgagctcggatctgggatgtttgtcaggggagactctgcgatgcactcggaaagaagctacaaatggatatcttccctccgttacggcgacgggatgttcagcgtctgtctggacggttacctgcaatgggtggacggctatatctatgacgggccggagaaagagacagtcaccgtgatttcgggggcatacccggtcttccagtacaggcagaccccggctttcttccgcggtatggaccttgacctgcgtttcactccgggcggttcatgggactaccatgccgtcgtctcctttatacgggcaaacgaacggacaaagggtaattatcttccttatactccctccttccgtttcagccatgaacttgcgtggatccacgagacgaaatcgcatctcaggctgcgtctgaacatcaggcaccgtttcaccgcaaaacagaggcggtttgatccggacacggatcttatcccgtatactcccccggcgtaccatctcctcgggttcgacgctggtcttgaacttcccgtgaaacggggacaccaggtccggttcatgctgtcggcagacaacctcctgaaccgtgagtacaaggaatacaccaaccgctcgcgttactatgcgcatgatatgggacgtgatgtgcgttgcggtgtaaactggattttttaatttataagaactataatcaacactaataaataaaaagaaaaatgagaacaattgcatgtaaaaccgtgtgggcacttctggtaggagtgtcccttgtcctgtcgctgaactcttgcagcaaggatcctgtaataccagaagacgagacgaagaacaagctgcatgaggacccggcaaaaatgaccgtccgcctcgttgaatgccacctgcacgctgactggaacgagatacagaaggccggaggtccccaccaaaatccggaatccccggccaggtatatgaaacgtgtccaggagatcacttatgaactgaagaccggcagtggatggacccttgctgaaggaagccagggcaagttttacgttcagaaaaacggcgaatataaaaatggaaacaactttaccccggccccggtttacctgatgtttatctattactacaattccaaaggagagttgatgaacggccagttcgtggagaacgggcaggaaaatatccaccagcatttcttcaccccggagaacgtgagacctacctttgacgggaaaccggaagctgacgacaatgatccggaggcactggtggattatctctatgtggataccacgccctgggacaagaccaaacatgacaacgaggcggaaattacgggaggcactaacccggtaggattaaaaggagttatccggttcctgaaggaccgcaaggagtttgacctgaaactccgcctgtatcacggctacaattctaaaaagaacccgcagacaaacggctttgacccgttctacaagccctccggggtattgatccagcgtggaacatgggatattaacctgagcatcccggtagtggtgttttggagccgcgaggagtttgttgatgtggacccggaggcagatgtgaacctgatcggggaggatagcctggatgaagacagcaaccgcacgctacactccatcatgaaaaccttcagtcttacatggaaggaggcgcttgaggagttcatctcctatacctaccaggcgggggatgtggaagctggatccatatggctttgataatcttgcgtaggatggaattctctctttgtcaatctacaggcggcaggtggggccgccttttttgtcttgtgcagcgaaaaaatcccatctgccatgcttaatccccgtggtttacttggggatgtattgggacatgctttaccatctcaccctgttccatttttcatgtttggcaagttgaaaaaaatcctatacatacaagacgtaccgttcccttaccgacgggtctggaaccgacttcccgtctttcgtgcaattttcccgcttggttactgaacttttttggtctttttccgatttgatgcatataagtttatgcttcctttccaggaaacaaggaagcgtcaaatgtctaactaataaaaaacttatggcaacagttaaaacagtattggtaaaaggaaggagcaaccggtccggcaaattcccgttagtcgtgcaggttcttcacaagcgaaggaaaaaggttgtttatacaggattcagcatcccggataccctgtttgatcccgtaaaagggagggttatcgacggcggggaaaacaccccggagtcgattcggaggatcaacaacaggtgcgaaagtatctcaagggtactgttaaagtgtatttcaatgatagagaagaaatcccgggaatacgaaatagaggacgtattcaggacttacggcgtgttaacccgcgaagccggtttttatttctatttttcacggaaaatccgagagcttcgtgaatgcggtcatgagggaacagcccgggcatacgcctccagcctgcgttccatgcagaggtacctgggaaaaaaggattttcctttcataaaactctcttcccggatcatttccgactaccaggggaaactactcgcttcgggtatatgcgataacaccattggtttttatctgcataatatcaaggctcttttcaggaagggatgtcgggagatgggcctggaacttccttgcccatttcgcgatataagcattaaaacggaaaaaactctcaaacgctcccttgatccggttgtgattaaaacactatccgcaattgaactggaaaaggacagcccattatctcttgcccgggacattttcatgttcagcttttacacgcgtggaatgtcattcgtcgatattgcattgctaaaaaagaggcatgttttcccgggtgaaatctgttacaggcgtcacaagaccgatcaattgatgcgggtaggtataaacaaggagatcagtcgtatcctggaaagatacaagaatgtaccgggagaatacatcttcccgttgtttccggcagaacgggatccgtacgctggttatagaagtgcctaccataggattcgttactccctgggaaagatttcccgggtcattggtttggaattcccgctgagacttcacgcggcccgccattcatgggccacgatagccaaggtgaacggtgcctcggttcatgttattggtgagtgtctggggcatacgtcggaaaaaacgacccgaatctatctgaaagaactggatcattccgcactggatgcggttaataatcaagtggctgacttcattttagcggtggatgattgaccgggcccgaccgcgaaagatatcagctcaaattcttcagttcccgtctggacgatggacggcggttaaccactcccaaagaggcttttaccaccgataattttaccattcccggatgtttctgtaaatcccgccttggtgcacgtggcgggattatacaggaaaaaaaggaacaccttatttagctaatttatcttataccgtcttcaattgaaagatggctacgagagggatttacatgttatggtatctacgttttggaccggcatctgttgggtaaacagatgatttaatggaataataatatttttctacattagttaaattctattatctaagatatttttttcactttaattatagtatattatcacaatatacgtatatttgttcctgtttcttcactctctcccgtagagagtggaaaatcaaaaaagttcacagcatgtgttaaaaaaatagcgtaatcctttttttatttggattacgctgcaaatttaaagacaataattttgttggctatttccgttttggctctattatttatcaatttcttatctcccccattcagagattgtttaaccgccttttatctgctgtcttaactctctgggagaacatcccagacatcttttgcaaaatctggagaagtgtgcaagagaggaaaactccagttcattggcaatggttcccaacggcaggtctgtaactgaaagtttgtatttgatttctcccaacaactgtttctgcatccattcggctggagcctctccaaactccgcggaaaactgtcttttgaaggcggaaagggagatatcacaggccgatgcgagttcttttacggtcctgcaacttttgtaattgttcaagaccttatttttgaagtcttgcgaacggcctataatcatatagaaaaaattcgcaagttcctgtctggaatagtaaaagcgaatgttccagaaaagttccttgagttttatttcgtgaaaatggatacagttcgctccatcttccagataacacaccagtagttcaagaaatttgcataaccgatccctgatttcaagaggttccatacgatattcgacaatttccctcaggtggtataactctgaaaaggaggccctttgacagggccatactcccccctcgaacagggcagccacgacttcacatttttccagtgattgggtgttaaacaggctgtcacggcaaaaaaagaccatctctcctgatgaaacagtgaactgaaaaccgttgcaggagaattgcagacttcccttgagtacgaacaggatacaatcttttaccaattcctcctcgtggttcaatccttcgtcaaatttataataccggaatccctcctgcatagattttgagtaattataacaagacgtgtgctcgttcaaataaaaaagttccattgtttctgtttttgttgcctaatgaaaatattagtaatcttattttcagttagttatatgataaaatctgtccatgtttcatcttttatttctttttggcatctataaccgctttccagagcggattttgaaaaattttccactctctacgggagagagtggaaaataagaaagtcatcgaataaaggtttacattatgcgaatgagtcatgagatattcaacatggaatggtccaacagggattcgatttacctgcatactcgggacggtgtcctctattcggctttcgccggatcggctgaaagacttttaagtctcgtgggcgggttgcgtccctgcaggtccttctggtgcgggcaggagtttccggccgtccactctatacgtgcaagaaagattctggagttttttccgggaagctgcatttttattaatgattattacataaggataactttggcttgtcctcttataaaataaagtaactacaaaagatactgatgattttaccaagctgacttcggctactgccgtgggtgcagaggcaacgacgggaggttataaattccttgacgtggacaatggcgtgacaaaggcacttgttatcgctaaccctcagggagcgttggttgacggtgagagaaagactgttgctgaaatcagcaaacaacagctgaaagcccaaattaatgaagtgatttatgccggttctgaaacacttaccactgttggtgccgagccttatggcgtcaatcctcaggaagacaaacgtaccgtgaagaaggccgagctcaccttgaccgccagcatgaaccgcttccaagtgaccggtaccaagtttgtcaaggttatctggaaagacgggaaaaagaccgaggctgaacaatggtgcacgacttggctggccaaggatgaaaataagggaaagagcagtgacgaagcgtgggccgctttcaaggctgatgccgcaggcttcaacggccagacatgggacggcaagtctgacattgcccaacagaccagcctgagtcaatggctgcaggttgtcgaagtgaccactgcaaaccaaggtatcctgatgaaccgtttcagcagaacgctctctgttcctcaacttacagtggaagaagaggcaaactggttctgggccaagacctacgccggagatcgctataaattcgaagacggcacgttcaaacccgacggtagcacggacttgtcggaagtggcctcctatttcaatgcagcgggtttcgatttcgcacagggggcaaaggccgcagcgtttaacttcttcgtgaacggtattacgggttacggtaaggaaaacaacgctccaaaacttgctttcgttttcaagacaggtgacgacggcgtatccgccgacagacgttttgtcgttatatccggttacgcgaaggcagaaggtgaaactgcaggcacgacggatctggaagccggcaagggcggttacctgatcaatctggatctcgctgcgctgaacgggggccagggtatcctcgtggatgttgacccgagcattcctgaaggtgtgactcccgaaccgggcggacagggggatttggaggacgagaacgtgaacgtcatcgtccgtgtcgaggtgcagccttggaccgctgtgaacgtattccccatccttgactgatacagatagagagtaatagccgcttgccggagcgcttttcccgtatcgaccctgacaggccggtaccggaatccgccccgcactctcggggaggggaaagtttgtcccctcccttttttattacccgcgggagggaaacgtgtcctctctttcgggaaaattacagtattgatttataataattagtgtaaagtatgaacataagaaacataccgacctggctgggcctgttggccgctttatacctcgtgaccgcatgtgaccgggtgtatgacgacctgagcggctgccttggcaacacgatcgtcttctcctacctggccgatgacaaccgggaacatctgcaggaatacgtggatgacattgacgtcttcatctttgacgttgggaacggggccttggtggagaaacaccacctggagggagaacagctgctttcaccgctggaggtcaggctcccggaaggtgattataaagtagtggccgtgagcaacgcgttgaacgagacggttatcggggatggtgcttacggtgaagcgtcggtttcccggcccgaactggcggaaaaggacggaccggcggccggcacgtttgacaggctataccttggggaaaccaccatcacgtcgaaggtcatgaacgactcccgtgacgtggtaagactttattcccagcacgtgaaaatccatgcggtagtccttcccgacgacgatgagaacgccgggacctggtacgaacagaacaaggggacgggcttccgcctgacgatggaaacgctctcagcccgtttctccttttccgggcagcgttcgggagaaacatccttcgaccttccgttttacacgggaggaaaaaacgaccgtttcgtgcttgatttcaataccctgcgcttcaaggacggggacccgctgacgatccgtcttatgcagggagataaggttctctgcacggtagatgtcgcggaatatatcgctctgtatcccgaccagatacggataacggggcggcaggaagcggtgcttccactgttcttccgccagaatccccgttctctgacagtaagtgtaaaaccctgggaagccgttgacgtggttcccataaccgattgatgaatattatgctgaaagatactaaatatactcgcacggtaagggccttgaggaactttgtgatgacggtgttgccgctctttttccttgccctgacaggatgccggaacgaagaagatatcccggaacggctttccggagaggatgacgtgaccgtcaggctgaacctgtcaacccgtggcgtaacagccgggggaagtgagatgctggacctttattcctccgatccggccaactggtataaaaccggcacactgtttccccaagcccccgcacagcccagaatagcacttatggttttcaacaaggagcagaaccggtatgtgtacagtcgcctgcttcctttcagttcgggcaacgcggagggggaatatcaaaccaagatacgcatccccaaaggcgagagtgaattctatgctttctatgcccccaaccagacaggaaaggacctgccctattatacgcccggaggaatcctgcagaacgcagttccatgggacttcctcggggaaggcatggaggaggtggacagggaggatattgtcgaagccgcattccctgccatcatcagggagcaggatgacggcagtctcggcattccggtggacaacccgtacgatggtgtgactccttccccgtcggatgagaagattatagattggacaacaacttccagtatctcttgggatgacgctcccggaatatccaacaggttgcatatgggcatgctttcgggaaagctgtccacggccgtccagcccgcttccggggagcaggtgcaggatatcacaatcccgctgttccgtgatttctcccgtgtcagaatatacatcgcaagcattgccccctttgagcagatcatttataattataaaaggattgcctttttgaactttccggtactgatgtctccttctttcagggagaatgactcggacggcggccagcttgcaggatccaccccgggaacgggaaagaacacagagcatacgggcacgtattcctatggaataaaaaatgaagcgcaactgaccatctacgaggcccccctcaatgccggcggagagattgactatacgaaaatggacacccaaaaatacgagcagttcttccttccccagtacctggccccgtatattccggaagccaattcctggcaggaaggacaccctcacccgaagatacagctgacagtggagtattatacaggaggaaacatctcacagaccaggacaaggacctttttgcttgacattggcgaggaaagttctcccggggtgtattccggccccatttacccgaaccgggattataaggtattcatggtcttgccggaagccgcagacagagagattatctaccgggtcgaatcctgggagcggaaggatgtggagttccctccttttcagtgatgttcacgattttgtcattataaatttttattatatatgaaagcatataggctgaaaataacttgtttcattcttttgttactgcccgttcttacctgctgtacggacgaggagctgcttcggggcagcggtgtcccggaaggcgtgcccacgacggtagacatcagcgtgggtacggcagccaacagggccaagacacgttcgggcctgccggaaggcgaggagagaaagatatacgacctttacctgtgggttttcgattcccgcggcggcgtggagttctcccgggagtatccccgtgcagagctttatcaggccgctgctgccttggaaacggcaaccggcgagaaggacacggatgcacccacgagcatgggattgctgaaaaacatccccattacctcgggagagaagacgttggtcctgctggcgaactataaatcggatggtgacgggctgtttcaggtagagcccgggatcctggctggcgtgtcgtccctttcggacattcagagggtcaaggcggagatgaccgcccgtaccctgttccgaccgaacgggaacctgctgatgtcagttaccaagacggaggagatcagtcccgacaccaggcgcctcgaggtctccctgaaacctgcggaggcgaaaatcacggtcaacctgaaaaccggggaggggctcacgttcgtgcccgggacatggagagtcggtaacgtgccggcttcgacctttgtcaccgagcatgtcaagggcagtgacgccggggctccttgggatgccggcgggatggagatggattcgtactggttgtccgaattattccagtttgagggcgacgctactacttctactactacgttttatcttccggagaaccggaaattggcaaaaaaaatgataactcccgcctctcccggttacaatgcggagaggaaggggtatgacctgcggcagaaacaagtgaagtctcccgttcccgatgctacggagaagccgaacgtgcagaacggagctacagaatacgccccggatctggctccctacatcgagttcacgggtgagttacgccaggatatgacaaccggtgaagtctcaacggagcgtttcgggagggtgacctaccgcatttatctgggatacacggcggagaatgatccggtcaacgattatgatatagaacgtaacgtgcactatacctataacgtgacgatcaaggggatgaacgacctggtagtggaggcgatgtccgacaaggaccgggaagaggagcccgctcccggggtggagggccttgtatatgacgctcaccgctccttcagttttgactgccattatgaacagggcctgatgcgtttcaacaaggacgagcttgccatcttcaatccggatggcagtttgaaggacgacgcgatgatctcctttgccatacgcaccccgttctgtgacaagatagtctcttacacgagggcggagctggaacagctggaggataacggatacgttccttcaggggagaagaaggcagacactggttggctcgcgttcttcatccacccgagcaccctgtctgacaatggaaacgaaaccatggaatattactccaacacggggacgcatctgctttcgctggaacagtttctttaccgacttgtcaaagagcccgattatgtatttaatgcctccacggggctttgcaaggtgacggtttacgccaacgagtatttctacgagcggaaccccatgcaggatggcgcccccgaggacaagaacttgtggaaaacctttgccaacgccccggatcggactttcgacctgctggtgaacacgtcgcatgaaatctcccccgacgggcagtcacgttatcaccaggctgtcgtttccatccgtcagatgtccatcaagacggtgtttacggagggacccgaaggcatgcgtgtctggggggtggaaaacgtgaacgagacaccggacctggactttatggtgaaggctccgggagaaccggatgctttttataataaatatacatccaacggctggtcgaatacctggaaggtgatggcaaggtcgggcgacttcagtcaagaggtcatgattgacccgatgagaagaagtaaacaagaccagttatggcaggtcatgacgaaggtggacaacgcgaagctgactctcagcagagaccattataatttggcagccaagaattaccacgccgaatatgcctgtttcaccccgtttttacggaaccgggatgataaccgtgatggccggatgcaggccgccgagatgaagtggtatattccttcgatgagcgagagcggtatgcttatcgtgggggaacgggcgttgccgttacattccaggctgcacgggcacgccccctcggacaacgccacagcattttatatgtcaagagcctttatggcaagtacaaacctttctttatactcttccaacccctatatttgtatcttggagtcccgcagcgtgactcccatcgcaaactttgattattacaagggagggaactcacccggggaccgcaccccctactcggaagtgaggttgatcagggatctggggatgctggagtctggggaagaaagctatcacatcgaggagttgggcaaggaactgaacaagtctcttgtcaataacaggacgaaagaggaatatctggtctttagggcagataacctgccatacagcatgacgcgtggagtaagagccatttacgagttgcccgcgcatgatgaggactcccagagcaacaccatttacaagaacgggtttgaggtggccaagtatatcgccaataagatagataagcccaaggatttgaataatcctgacaggaagagcgagtattacttacaggattggagcacgctgatggcggacatcgaacagggaaacagcccgtgcgcctattattaccaggaggcggacaagagcgacctgggaacctggcgggtgcccaacgaggtggaattgatcatcatgtgcgggggcctgttcgactggcataaccctgagaaaaaggaggtttacgaattcggtaatgaccttccttctctgggagtagtagaatctgaagttctccattctcggacgggattttccaagcgtagcatgaacggggcaagatcgttcagtgccggctaccagatgtatctccatggttatctccgatgggtcacgaccgtggatacccaatgggcgggtgacaatgacaggcttgtgaataacaggaagggatacgtgcgttgcgtgagggaccttgaatagtctggtcccggggattggggaaggaatttcccagttttgcaggtgtgaccggaggaagccgtatcatggcttttctccggtcttttcgatatgaggaaaagttttttcatcgtaaagggccgaaaggaaaacctgcgatcgaatcaagcgaggcataaaaataaatcgggtagcgtgaaggtactcacgtgccccataattaaggaataacatgatagaaacgtactttaacaacttgatgcaggaggtcgaacgtaagatgggcattgaatcttcccgtatggagggagagcaagtaatacggacttgtcaggagatggtttcttttttgagggagcgatcccgtgagttgaaggactatgtcctgaaccacccattctccaacgtggaagaggaaatctgctttttcaagtattacaagcctgccctgacgggacgcctgctgtattattaccgggtataccagatcgagagcggttgttcatgttgcccggagattgcccggatgcattaccgcaaggctatgaaagaataccagcggaaactggaacgataccttcccttttaccagtattaccggagcggggcgacttaccgggaccattactatttccgccgtgccaaaaaggagctgagcccggaaagcggaagttttatgctggaggaggattcggtgatgtcaaccggttatgacttgttggccgcaagactgatagcggcggaaatgttacttggttatctgaaccggaaagtgctgctggcaatggagggggcgtatgccgtgcaggaaaaggagcaccattggacggaccggaaggcggctgccgtggaactgatatatggcatttgggcgatgggtagcgtggataacgggagggtgagcattgtcgagctcgtgatgctgttcgaacaaatgttccatattgacctgggagacgtgtaccacacgtttatctccatgcgtaaccggaagaacagccggacagcttaccttgatcaaatgaaggaacgtttgttgaaacgaatggacgaaacggacggataaccttttgtaaaacaaggaagagactggcaggttcatagcaagttgccaaatcacctttcccgatacgccatttggtgaaaatacagtatatagccaccgtagagagcccgaataaggctccgcggcggtttttttgtaccagaaaaaaaactttggcagcttgctacgaacgtgaaaagaaaaacggtcgaacagactgacctttgtaaccggaaaccaaattattaaaagattatggaaataatagcaatcgaaagcaaagcgtttgctaccctcgtggagaagatagaggggatagcggcatacgtggaggcgtccggaacaaaggagcgggagcaatggccggtagcggataagaagggtacgaggaaggcagggctatggatgacgggaaaggaagtgtgtgaacaacttgaaatcagtccccgtactttgcagcgttaccgcacgaaccgtatcatcgcttactctatctgcgggaggaagatacgttaccgccgtacggacgtggaacagttccatgagcgttggatacgggaaacgcctgacaagctggtggaccgaatgattgaagcgtaccctttacaccaatgcaaaagcagatcatatggtaagaaaagaggaaatactggcaaaaacaggtaacgggctggaggtgttccgtcattatctgcccgtaaaatggcgggtgggtcgaaatttcctgaatccgctgtacgctgatggcagggcctcgtgtaacgtttattatgatcgccacagcgggatgtacaggatgaaggactttggtaacggtgagtattcgggagactgtttcttccttgtggcgaaactgaaaggactggactgccggagtgccgctgatttcgtggaagtgctgcacaccattgaccgagagctgtgcctggggttggatggggccatcccttccggtaccaacaatcgggggggaagctgccggacgacacggcccgtaacgggtgcacgaaagaaaagtgagggagaaaataccggggagagcattcccggggatactgtcacgggcacggaagggaaagatttatcccgcgagcgtcttggaccaagtccctaccaagtagctgaaaagtctttcacagagagagagctcgcctactggggcatatcgggcatcacggtagaggtgctgcaccgttacggggtggtgtcgctcgccgagtaccggagcgagacaagggaaggcaagacgttcggctttacttcaaccccggcggaaccgatgttcggctacaaggggaaatggggcgtgaaggtgtaccgcccgttatcggaagtgcgtttcgtctatggcggtcatacgggcgacaactactgtttcggtctggaacaactgccctcgaagggcgacctgctcttcctcacgggtggcgagaaggacgtgatgacgcttgcggctcacggtttccaagccatctgcttcaactcggaaacctcggtaatcccggcgaagaccgtccggaagctcgtctatcgcttcaagcacatcgtactgctgtacgacacggacaagacggggctggaatgctcggagaagcaccgggtacaactgtcggagtacggtgttaaacggctggtactaccgctgccggggacgaaatcagagaaagacgtgacggactattttaaagccggacacacacgggaggatttgatggggctgttcctgaaactgctcgacacgctgtacggggacacgatggcggtactgaaatcgtgtgagatcgattacgactgcccgccggagcaggcagtcgctatcgtgaccgccggggacgtgccgttaggctcggaagagaacatactctgcatcacgggcggagaagggacgggcaagagtaactataccgccgcgttggtcgccggggcaattatggaacgggaggaggacgcggaccttcttggggtgaaggtggaaccgaaccgaaaggggcgtgcggtgctgctgtacgacacggaacagagcgagcaacagctctacaagaacacggggcggctgctgcggcgtgccggtcgggagaaaatgccgccttacctgcacgtgtactgcctgacggggatgtcgaggaacgagcggctgaccgccatcatccaaagcatggacaagtaccactacctgcacgggggcatccatctggtcgtcatcgacggagttgccgacctgatccgttgcgccaacgacgaggcggagagcgtggcgctggttgacgaaatttaccgcctggcgggaatttaccgcacgtgcatcaccgccgtggtacatttcgtcccgaacgggttgaagttgcggggacacttgggcagcgagttgcagcggaagtcggcggctatcatctccatcgagaaggacgagaacccggaggtgtcggtggtgaaggcattgaaggtcagggatggaagcccgctggatatcccgctgatgcagttccgctgggacaaacaggccgggatgcctgtctatatgggagagaaaccgagggtggagaaagaaaggcgcaaggagaaggaactgtctgaaatggcacgggcagcgttcgtcaggcaaaaaaagtatggctatatcgagctatgcgaactgatacaggaaaccctggacgtgaaggaacggacggcgaaggggtacatccgttacatgcgggaaaaggaaattattgaaaaggagggcgactgctatgtatatggacagcgaaaaatttgagaattggatggagcgtatcatggaacgtttcgaccggacggagaagttgttggaaagagtactgaagaagagcaacgcgctggatggagaggaggtactggataaccaggacctgtgcctgctgctgaaggtcggtattcgcacattgcaacgttaccgtgccattgggatactgccgtacttcactatcagtggcaaggtcttctatcgggtgaaagatgtgcacgagttcctccgcaaccagtttgccgctgtggaggaacgggctgcaaaacggaaggagaaggaagtccggaaagaggaaaggcgcaggaaaaaaggcttgtttccgtaaaagtgatatttcctttatgatttctgttagtggacggggacttgccggatcgtgagattaggcagggctattgttttgttattcgggaagtttcccgtacctttgtgacaaagtacggtaggtggtactctaccggggtacggttgctgtcatgacatgaaagattcatacccggcttggaagcaagcagggattgatatatatatattgtacgttcgctgaacgtcttggaatagaaaactggcacttttcaaaaaaagacaagatgtatagcgcaatgttcatgctgtatgcttatacggcgtgagtttgcctattctgtcttttaggtatgccagtacctctattccggaatagtgtgagttcacgctgttctttttggtgcgaggcgggcataatccttaaaaacacattgttatgaaacagattaccttgcacgtgtaccaatccatcgacggctgtccggtcatagcggacaagtgtttcaatgcggcagtggacgcctgtgcctacgtgctgattgacgaggaaacttacctgcgtatttacctgaataatcttgactggccgcttgaggcaaaggagaccttggtcgtgacgaacggctgtatagacttgacagagacagaacgggtacgttttgtcagggggaatgtggtaacggaactgcgacggataaaggagaatggcgacggtatggtggtggcttacggaggagaaaccggagttttactcttggacaacgggctggcagatgaaatcgtgatgacaaccgtgccggtgctggttggtaacggtgagaaggggctggagtgcggaccgaacgacggcaggatatgggccgtacggtcgagcgaggtgctggaggacgggaaaatccgaacggtgtacgggaggatgtaataaaaaaacgacccgccgatttgggcattattaaagaggcttggcaggttctattgattgcaaagataacggaaatagttggaacgacaaatattagaatactacaaatgcgcaactatgtgttgcgcatttgttattattgccggattgtctttaaaatcaactcttttaattgttgttcagtcggaagttgcaactggtatttggaaacgaatatctgttcatccaatccggttgtggtgtaccgcaccaacgcatcgttcttgtccgttaccagcaaaatgccgataggcgggttatcgcccggctccatcacttcggctttataataattcaggtatgaataaagttgtgacacatgagcgtggttgaaagtatcaactttcaattcgcacaaaatatgacatttcaaaatccggtggtagaagaccatatcaatgaaataaaattcgtcaccgataaggattcttttttgtctggcttcgaaacagaaaccgtttccgagttcgataatgaagtctcgcaaatggtcgagcagaagtgtttcgagttccttctcctttaacaaagaagcccgttgctgcggaatgttcaagaactcgaagaaatagtcatccttgacggcatcgtttacagtttgtgggtgaatcttctgctgaatggtagcaagtgcattttccatgttgccggataagccgacacgttcataactcaacgctcctatctgccgtttgagttcacggacagaaagcccggtttggatggtgagcatttcgtaatacatccgcttgacaggattgtcgatttttaccagttcgataaagtgggtaaaagaaatagagctgagtagtttctgaggctctatcgtattaactatatcttgtttgttttcagcattttgtaaaaagtgcatcagtgatgcactttttacaagaccctgcatttccaataagtgcatcgttgatgcacctgttggaggcaatatcgtttttattacagttgccaactggggatataccatatagaagactcgtgaacgcttgaataatgtaatattcaatccttttaaattaactttttgttccaagtttttcaataagaattccccatatttggcacggtcttctccgttctgctcgaactccacgatataaaaaccgataagccagttacgcatggtctggcactggtttacggctttgaccgcactctgttgtaatcgttggtgcgtgtcggctatgatggttgctaattgttcaaaattcatgttatgctattgttgaatgttgattaaagccgttcgggtattgtgcccggaacggttgccatccggccacagaaaagagcaatcccgccttttctatgtgaccgattggcaaatatagggattattgccgggattacggatataaaaacttgaattcctgtgggctaccattgtctatcaagagccgttcgtgctgcagagctgggcggcttccgctacggagatccaaccgatgccgttcatcgcctgcgctcctttcctttggacttgtccgtgcgaggcggaaacccgtatacgatgcggaagtccttgtcgaaagtgaggtatgcatcgaaggggttatcctccctactcctgaatcctttgatcagagcagtcctgcctttggtcacgaggtcggtaatctggctgtcggtgagctgcttctcccccttgttgcggaagacggtaagggaacaatcgacgttgctgcacttggcgaccttcgggtaaaggaggatgcgaccggaacggcacttggggcacgggatatgtccgccgtccgccaccgatacctgcacttgcaggagttcttcggtaatctgggcggcatagacctcgatggccttgcggaagctgtcgggattcatctccccgctctcgatcttggcgagggcggtctcccactgcccggtcatctcgacatcggcgatgcgcttgtccttcactatctgatacacggcaagccccttgtcggtcggcacgaggctcttcttctcccggcgcacgtagtcacgggcaaagagggtctcgatgatggaggcacgggtggcgggcgtgccgataccgttccctttcaaactgtctcgaagctcgtcgtcctgcaaccccctgccgcaatgctccatcgccgaaaggaggctgctctcggtgtgcaggggacggggcttggtctgtttctccacgcactccgccgattgcagggggaaagactcgccgggctgcaagggcggcaaagcggctgttccctcgtcgtcctcgtcccgctcgccacgcacggcacgccatccggcagacctgacgaccgttcccttggcggtgaacacgctgttccccgccgtgaaggagacggtggtaacgtccttgaggcaacgggcgaagaaggcttcgagcaggcgggcggctaccatgtcgtacaccgtgcgctcgtcggcggacagctcgccgggcagacactcggtgatgatgagcgcatggtggtcggtaactttccccgcatccacgcagcggcggttgagcgaagcccctttcagggcggcggcatgggcggcgaaagccgggtaccgctccagcagggcgatgcggtcgggtatctcgtcgaacacatcgtccgagaggtagcgggagccggtacgggggtagctcagcaccttcttctcgtaaagcgactgggcgacggagagggtcttgtccgccgagaagccgtacctgccgttcgcctctttctgcaaggcggtcaggtcatagagcaagggaggttcttggatcacctccctgcgctgcaagtcggcaacctccaccgtccccgttgcggttacagcgccgagagcggcatttgccgccggaagggtttcgtaacgcaattcagagatggcggcgaagggcgtgccatccttttcagccgtgaccttcagccggtaataggtctgcggggtgaaatccctgttctccagataacgggagcagatcatcatcaaggtgggtgtctgtacccgtccgagggagtagatgccctgcccggcggcgatactgagagcttgggtggcgtttaatccaatctcccagtcggcgatagcacgggcttcggcggcacggtagaggttgtcgtagtcgcttccgggtttgaggttgtccagcccttcccggatggcacggtcggtcagcgaggagatccagaggcgcaggcagggtttgcggcagccaaggtaattgtagatgtaccgatgaatggcttcaccctcacgcccggcatcggtcgccacgacgatacggtcggaacggtcgaaaacctccctgatgaccttcaactgtttgagcacgccggggtcgggcttgtactccttgccctcccgtatctggcggggaatgtacttgaactcctgcggcagaatgggcaggttctcacgccggaagcccgcatagccgtatgcttcgggcatggcaagctggacgagatggccgaacgcccaggtaacgaggtagccgttacctgagaggtagccatcgtgccgctctcggacattcaacacgtttgctatatccttcgctacggaaggcttttcagcgataactgctgtaatcatatttctttaaaatttaacggtttgacaaaagttatcccgtcgtccggacgggataaccgtgtaattcatttacagagtggcgggggaaatcagcggcggacaccccggctgcgcttgggcttgtcgggctgttcctgcttctgtgactgtttccgttcctctttctgctcctgcttgcgctcctgctgctgtttctgctccccggtggggcgctgctgtgcggattgcagggcttctttcaggttgcgtgtcgcctctacggtcttgccctcggaattgaccgccacctgcacctcgttctccacggcgggcttgacacgcccctcttcgagtgccgccttgtagtccttggggaacatgaaggcgggcttctcgccgggcttccatgtgatgtagccttggtaggcttttcctttcttgtccaccagaccggagaccttgaccgttcccccggcttcgagttcgaggcgggacttctcggtaagctcctgcttgcggaaagtcttcggcacctcctgattggcggtctgtttcaggttcgtcttgtacgcatccatcgccagcttgccccggtcgccgaagagaaattcgagctgcatcttggctgcgctgaactgtacgggagccgggtagatcttgggttgctccccctccttggctctggaaaggaactggcagaccaccgcctcgccctgtttgagccgggctatttcgtccggggtgaaggtatgcccgttcttctccgccgggatattgaccttggagagcgggaaagcgaccagctcgttggtcttgaggttgcggctgacaagggcttcgacctgctcgcccgcccggttggtgacggtcgccgggtgccccatgttgcccgtctgccggagcacctgcttgtcggagtcggtgatgtcgtaaccgaagaactgcttctgcatcttctccgggtcgaggatgccgtggctgcaaacggtcagcctgccgtccgtgccgggtttgagcgagagctggctatcgttgctgtgcgagatgccctcgaagtggaaatgcacccggacagtcttgtcggtctggaagccccggagcatctggtcgagcatcccgttgccctcaatctgttcccgctgcacgccgagggcagcgaggctgttccagtcgatgtcctccgggcggtacttgtactgcgggttctgttcggtctgcccggcggactgctgcggcgcatcctccggctgttgctgctgcccggcttgggtctgctgctgtgcctgcacgggcggctgcacctcgtactgtgcgaggagcggctcacctgtcttgaccgaccggctctcccgctgccggaaatcggcggctacccgttgcacctcctcttccggaacacggaagaaatggaagcgggtcggatctttcaactggctccagaggttggaaaagaaatttgaaaacatatcgccgtggcgatccacccgcaggaggtcgttgttgtcctccagtgggttcttggtctgtaactcgccgtcctttactccgctgacggcttggagcgtgcctttctcgtccatgacgagcaggatgtccattaactgctggctgctgtccggttgttcgtccataatctgaaaaaattaaatggtgaatatttttaaggttccgattgaaaccggacgtaaagatatgggatgaatgctggaaacgtgcaatttacggcttaggtatcctcgtttgtcctcctgttcgtagatttgtcacattccggttcgagagtaattgaagttttgattttctcgtgacctttttaccccgaataaactgtaaataaaaatatcactgcaaaattatatatggtacatacgtgtagaattattttcgatgctgtccgaacttatcggaaattttatgaagaaaggggaatatttgcgtcatatgcgggtattttcatctgtccgttttccacggggttattcgtgtgtggccttgtaccaagaggtcgtacctttcagtaaggccatgggattggtgctcgggtccgagatcgttatacccgagaaagtatgtatgggaaggggccctctggccctggaataaaatttacccgtatgggttttatagggaacaagccgctccagctgttccctgaagcgggctgtcaggatagggtcagagcagagggtgaggacataatcggcaaagtcataaaagatgacgggggtgtatccgtccagtccctggagttctccttgtagggaatcatcgaaaacatacctgtcattgatacttttcatgatagcagccatattatctaattcagagcaatctgtcacagccagtgtcccgcagggcatcatttcataggttgaataaaagtcgtggaatccttcgcaaagggatccgtaatcaggatttcccagcaggaactcccccacagtggcgtaaggcattccgtatgccatcatttcactggtagaggctataagaaatcttgtggcttctttcagttcataggcaacctctacggatgacatatagcaatcgtcaaacaggatatactccattttgacgcccgcgcctacaatcccccgggccagggtacccacgtccgtttggaactcccgggtcagtcccccgaaatagcgtgtcagcggctgctcctgatactcccaatgctttttcatccggaaaagggaatgcgcctgtgtaccgtccacaggaagccatcccatgccatgggaacctatgatcatagcgtaaaccggagcaggagcaaattcctgcacgtcgttcaatatccccgttatgccctccaccgtagtaaaccccggagtgccataccttttcagcgttttacgatcgcactttcctttggaatgtatgatctcaaacatcgtggcttccgtagagctcgtggacataaacacgagaattctttcatgctccagcccccttctgcttacacacgcctccatatccgcgatattggtgtaaaaatagcctgtcaggtcagtggaccacggcagaaacatgaataacgttttccgattttccatggcttccccgagctcttccttttcacatgaaagaaaaataagggaacagcacacgaaaagcaggatactggtccatgtataaattttccgtggagctttcatcttgcgtatgcgattaatcggtgaaaaaatggttgacactgcccgattttacaaccagataaggttcctttaccgccaggctacggcaaaaaaggaccccggatccatgtcatatgttcaagagaaatctccggggcatatttcccggaattcctccggagcggaaatatcttcctcggatatttccacgtgttccacgtcgtcctgtcctcttatcatgcaggaaaacatctccgccccgtccagacaggaaaatacctcgtgcctcggttctccgttttcaaaccaataaacgcaatattccttcatcgtagtaaaaaaacagtatttaccggcacgatctcaagttcgataccgaattcttccatctgctgacggatattcccgcaagccagtttctccctggccgcttcaatccccgtgaaggcatcgtatcctttcggtgcagatacaattttcccttctaataccgcatgggtgatctctcctccggcttttaccccggcattcataataaagtaataatctttcatcttatcgtgagttgaatctattaatctatttaccggtcagagaaaaggccggatatttcaccgcaaacccgaatgcccgttatcttctcttgcaagtccattccgggatttgttataataacggttcatcgatccacgatcccgaaccggaccagcatcgaatatctcttttttatcgtgcggcttctctcgaatgggggcggggcaaccgataagatatgaccttgtgcaaacatctcttttccagcatcccctccttccacgatgcggatgatctcacccggcctcttacctattgcctccagcaggtaaaccgccttttcccgtgccgctttcagtgcttctatcttgcccttcctgtgataggacaggatatccctatgttccagtttatctatatacatcgtatgaattccttttgtgtccacccgttttaaaatttcatcaatcagtgtgaagtcacgtaacgtgacatcaaatgatttgaaaaccagaaaatcctgtcccggcttacgccaattatcgcccacatcctttgtgcggattgcctcccgtggcactccgactattttcaaaacctgcttcaattcctcctctatcctggtaagaggaaccttcgtccgatattcttccggtttggatacgccatcaaactcttcttcgaagtactcccttatttcgataacgtaatgaatcctgtcaggaactacctctatctcggaagtaccggttacctctatataacgttcgcccacctgagcgggcagcggaaaggggatgaacatgaagatcaacaataaaagattgaaaacacgcataacagtctatttacaggtttaccgggaatctacatgatcgtccggtcatctatgatcctgtagtccatatctgaacggggctggaaaacaggagtaaaacatgattgataaatttccataaaacacattaaaatccacccctccctgacaatggaaggggtagattcactcccggtctattttcgattatcttctttccggagaaccaagaaagactccgagggtttaaaatgagggaccttgcgagccgggatgcatatggttgtgtgctgttggatattctgtgccttctttgccgcccttttcttcaaagaaaaggtcccgaatccgcgcaggaatacaattctctctctgccgagtgcatccttcacgcatttcatgaaactctcgattaccaggccaacggtcctgcgatcgattccaagctcctcagagacccggtttataatatctgctttagtcatatctgaattttaatgttcacactatttttatcattcagggacaaaggaaaatttccaccgccaaggagtagcctgttcctcagatatgttcctgcccgataccgtccataccgtttgaataaacgtcattgtttcttcagcaagtcacgtatttctgaaagtaacttttcctcgttgctcgggacaggtgggggcaagggtgtctcttcttttttgcgcctgagattggagagcaggcggatgaacaagaaaatggcaaaagcgatgatcacaaaatccagcatggtctgtatgaagtttccatagtttatcgtgacggccgcctgttcgaccccatcaactaccctagcgggttccaattcccatctcagttccgagaagttggttccgcctaccagcaaccctatcggtggcatgatgatgtctgccaccactgaagatattattttcccgaaggcaccgccaataatcacacccacggccatgtctactacgtttccacgcatgacaaacgccttaaaatccagtaaaaaactactttttgacatctttttttattttagttgataataatgtatcaaacaaaggtggataacagagaaacgtgtctcggggtcatccaccttcccttcatcgttgtctgtcgctatgctgagaaatggctttccacactatggcactggccagacctcctgtcagtggagcgacgataaatagccaaagctgtgagatcgcgcctcctccctcgaaaagtgcgggtcctatgctgcgcgcgggatttactgatgttccggtgatgggaatacatacgatatgcaccaggacaagcgtcagcccgatgaccaggcccgccagtttaccggcccctttctttttatccgtggctcccagcgccacaagaacgaaaataaacgtaaagacggcctcagcgataaaggcctgcaacatttccccctcagcaaagccgttgctccctgtcatggtagggccggcatgtggccccgtagataccagtatgaaaagtacggctgatccgagaatccccccgattatctggaaaataatgtataacagggcatccttgccccccattcctcccgagcagtacatgcccagtgtgatcgccggatttatatggcatccggatattccgccaatagcgtatgccatggcgaccaccgacagcccgaaggctatggcaactcccagggtacccaccccggtggtgaccgcaccgggcatatccccggcaaaaacagcacttccgcatcccatcaaaacaaggatcattgtcccgatcatttcagatacatacctgttcatagcatttcaaattacatgtagaataaatatagttaatacattctgttcaagtgaatgcatctttccggtattttccggatcgcatttaacggctactggattccgttcccgcgttgatcgtacagatgcttacccggttccagtcgggctcctcgaacatgttccctactccctggccctcggctacaatccgttcttctgcaattccatacttgcccaccagcatttttttcacggcctccgctctttgtcgggcgatccgctcgttaacttccacgcttccctcaggagaggcataacccttgatgagcacacttgctcccttatggttctttaaataagtagcgatacgttcgacattcgggagttgggagttgtcaactgtcgtcctgccctggcggaaagttatgacggattccagcgtctttttagtgttgtcaatggtgtctttcacaatttttggttcctggttgcggcatttgtccagtgcggcctccagttccgttacctttcgcactgcctcctgcaatgcctcggcatctttaccggcctgtgtatgaagttcattaatttttgcgttcaagacatccacctcctgctggtcgtaagctctcacttttgtaaagtggtgtttcccgttactacatccgaaatgatacttcagaccaacggatatttcccatacggcccgtccggaatggaaacgtacggcttcggaacccatagcattcatgtcatagaccagggcaggtttcagtgccaatgtccatgccttgctctctcccaggttgaaattaaagttcaggcccagttttgttgacatgctgttctgatcggaacccgtttcccggttcatataataatgcaaccatccgattccggccaccgcttcgatttcaaaaggtctgggaaccccggtataggtcccaaggagattgttcaggttcaccaaccccaacagactgacattggagcggtcgaaaatggtcctgctttgtgaggtgttaaagcttccgaccgcctccaaaccgaaaccgaaaaccggtgtcaattgtttattcagttctatccccgtgatcgggcgcatgtttccaaagaaagaatgatgtgttaacggggttgttcctcccgcactgatcccgatggaccagttgtccagaaacttgttaccctctactgcagtctgggcatttgtgtgatacataaaaacaccagacaaaaacaaactgataaaaattttcttcatcataaggtttaatttttaattattttgcaaaaatcgaaatttattcaaaaacacatgttttcattccagctcttttttttgtcattttagctctttaatgcaaagaaactggctgtatggatgaccttcagaagtgattctttttcttttggaagaagtggcattcaaaagaagagtattcataagttttaatattttgattgttaaactacaaagacacaagttttttccattcatgtgaatcacaagtattatcatgagcgatcattctgcctgcttccccatgaaaagcagtgtcgatctgtttattagcaatgcaaaaacatggacaattatatttataattttgcagcaatacaatcatagcataagcggttttatgcttattaatcattctcgataatcatccaaacctgttgcacgtccatccggtcatgtaaagtaaaattcccaggcctggcggagaaatgccccgtattactcctcctgacctgggaatagaatgatgcggatgagattcccgcactgtttcaatccattttcatcactatctgaacattcgggttatttgctatccagggcattccaataatccatgttggtaacccgttccagcaggacttttctgtccccttcacggatattgtccgcagcagtggcggagataatggccgcacgcttacccacgccacgccatttaatcatccgggcgggaactccacgcccgatcagggcggcatgcaccttttcagcacgccgtgcggaaagggtcaagttataggagtcgcttcctttggcgtccgtgtagcccgtgataaggaaacggctgtccggatagcttttcagtagctctgccagcctgtcaagcgttctttccgaagtggctgttatgacatccctgtcaaattcaaaatggatattctccaagagatcacacgccatagtgtcaataatggccggaacctccacctttttctcaaccacccgctcgacgattctttccacgggtttctctatctccacatatcgtaccaccggagccgcatgtttgctctttccgccaatacgccagatgacactggcagaaacctgaacgaagtggggaagccccttctgcacgggcagaaggtattcaccttgtaaccccagcccgaacgagttgcttaaccaggctttcacacccgccccgaaagacaggggaacaaacgagtttttgtcggatgaacgcccgtcaggattccagatgtcggaagactcccaatatgcctgtccggttggatcatcctcaaagttgccgccatatacggaagcaaagtctttatgcagatagttcacacctaccctgagataaggttcaacccattgggatctgagcaggggagtaaagcggaattgtagccccagtccccccatgtacagtaaatcacgtttcctgtcatcacctgcggtacggttgttgtttttcgtcaaaccgacgcttccctgcaaatccaggtaaaaccaccggttcaattcccgtgcgatgtacaagtttgcccctcccatcagatgattcgctttcaggttataaaagtagttgtccggcgtactccggaaaccagtgactgacacccgactccagtttatcagcgaaccgccgagaccgatctcccaggcttttgattccttttctgacagtccgtcatgcgtcacctctgcctggagaggcacacgacgggtcgttttcgtgtcctgtcctctcaccgccagagagaccaacagcaaggagagacacacaaagcatatcgttatttttttcttcatattcaattatccaataaataaatcaattcatccagtcgacaggacaatccttgattggcaagggcatccgcttggaccagtccgcaaaatcaactaaatagtacttatcttcctcttttaacagatagtaagcgtaacgcccacggtactcgttagatatattatatgttattttatcagtgctttctgtccgtcgtctgatatccagaccaatccagttattgggataagtgcttgtcagtttaaagcgcttgcctcccgttgacaacggcttggatccggtatgtacagttcctcccgttccattgatgaaagtacgcatttctataaatacagcccgattttcttccagctctgatgccggcaacttgccttccggatgtttccaaacattggttccttcctcttttgtaaatttatcttgccctgtcgggtaagcgtatgttttataaaaatcctgtaaattatccgtgtcaatctctccccacatggtggtaataccctgcttgatttcaataaacacactgttttctttaaaagatggggccggatacacttccgggacatgtatcttgtcctgcaaatatatagtctgtccatagtcattataacttcccgtaccatcaccaaaatacagtgccgcataattgtctgtttggtcccattcatatttcgccaacttgccgacagtatcattcttcgccacatttgccttctccgtctctgtcaaaaccaacggacgaatgatgtagagatatgagtttccattgctatagcggactaactgatctttgtccacatttccttcgttgacaggccggtttatatctttaaccctggccgatttcatactattataaggagtagtaatggacgtcggatacttatcccattctccatccacttgacgctcgaatctgtaatatacatttagtgtcctataaatatctatcgacgtattagaataattagacagatatgcgcttgtaatgatagctctaacattgatcctattcggcaccaacgtgttgcccgcactcgtttcctgcgttccatcaaccgttacagtcacacttcctttcctttctgataaacccttattgtctggcaatttatcccatgtgaccttgaactgcccttcctcgtttgtgataaatgcatccgtagaagatacaccgggtaagtcgctcacctttactccggctgtgacctttttgccggtcttgtcatacacggtaaatagaaccgaaccgtccgaaggtacaacatactctttcagggaagagttccagtattcaggaataacattgtattttccaacttctatctcgataacagaggattttccggtcaggaaatcccagaaatcagtctgcttgttccggtccgccggccatttttggtcaggattatgcgggttgtccacatcaccggacgagatatactctttccaaagctcgtaggcacttctaccgttggctccgttagctccatcctttccgtcctttccatctttgccatccttaccgaaagcgggcttgcctgtatccgttccatttatataccagttgccgttatcgccaatggcaacctcgggagatttcccgtcctgcccaacggcctttttcccggtatccgttccgttaatataccagttgccgttatcgccgatggtgaccgtaggaggcacggcatcctttccgtcctttccatctttgccatccttaccgaaagcaggcttgcctgtatccgttccgttaatataccagttgccgttatcgccaatggtgactgtcggcggtatagcatcacgaccattcgttccgtctttaccgtctttaccatcctgaccatcacgcccacgtgcgccgataccggtatcctctttcccaatgaaccagttgccgttatcacctatatgcggtgtctgtccgtcctctccgctggctccggtcaggaaacgccagaaatcctgtaccgtgttgttttcggagggccatttctcgccgggattatgcgggtcgtccacgctaccgctggcaatcatgtctttccactgctcgaaagcactctgaccatccttcccgtctttgccatcttttcccttgagaaacttgaagaagtcagcgacttctgtctgatccttcggccagttgacggttccatccgcaactttttccttccaaaactcgtaggctgaaagccccgtatcacctttgggccccttgggcatggtgatatccacgtctgtacaggatgtcatgaatgacactatgaccatgccgcacagaactgatgatttgaataaattcatgtaattgtttaattttaaatatataaaatgaggaataaatcaatataatcaatacctaaaataattccttgatttacggaaaaacgagcagtaaaaattaaccatacttgttgttattaatattaataatatattttttgcaaaataagatgaatgttttaatttttaacttatcaatttagctctattttttaacaattcgttcagtaatcatgattttattaataaataaaccgtatttttggcctatatcaatatttatatttgaatatgtacattaaaattcctgcataatcagatgcaaccgactataacaagaaataccatacggttgttatggtcactttgatcatctaacaatttcgtcttcagacaatccgttcttgtaatcaataacttgaagcgtttaaaaatcaggaagtacggtatattttggacctttttctttcttgtatgttatttccccactcccggctgttgtcttttagcacgcagcatttctgccactttcttttccgtccaacgctcgaagtcctccacctctttcctgatcttccatattagcttcctgtccctgttccactcgaagcagttctccagcctgtcaagtgtcttggcgtccgcatttcccgacatcagaacgtagcggtatttgagccgccagccccttttaagctgccatgcgttatgcaccagcgaaaaaagaaacaattccacgatggtgacttgaacaagatacgacctggaatatgtcacgttgaaactatggctgtggtttactttcaacccttccaaccggtctatctgtcggctcaactgttgcaggtactcgtccgttgctgcacccttgttctttcatccgtcatcctgaacaggactttgttcgcctggagtgttttatgcatttccagcacgtcctgaccgcctgcggtgtctttcctagacagatgcagacagcctgccacattatatcaagttgctccttggtcagttatccttttccctgctattttccatggctgcgtaattttcggtttgcgctcttggcgaagaattgcttaaattcgctattattcaacaatttgcgctgttcaaccaacttggtaaaactatataaaaacaactgttttactactaaggtagaaatttacgcttattatccgtttttgatcaggtgtgagagtttcggatccgccttgatgcgctcgatctcgtcagcgacaatctgcttaacctcgctcttgatgcggtagtagttggcatcaatctgctgctgcatggtgtcgttgccatccttatcggtgaagtcgatgatctgcggtatcttcacgtagcgggcggtctcccgcctgaccttctcgttatccactacaatctcggcatggaaaatcttctgctcgatgcgctcgtcgaagttgtcggctaccgcccccacgaacatgccctgcgtgaggttggaaatcttgcttgccggaataaggctgtccatctgggtgttgatggagacggaagtctcgttccggttgatggtcatgttctgccgtttctgcaggacctttccgaagcgttcggagagcgtcttggcggtttccgcaactacctgacctgcaaatacattgccgaccgtgttacagattacggcgctttccttgtcaccgtagtcacgcttcaactgagagaaatcctgaaagccgagcatgacggctaccttgttgcttcgagcggtggcaatgaggttatccagcccacgtatgtaaatggtgggcagctcgtcgataatcacggaggatttgagacgtttcttcttattgatgagcttgacaatgcgggagttgtacaatcccaaagccgccccgtagatgccctgacggtcgggattgttgccgactaccagcactttcggctctttgggattgttgatgtcgagggtgaaatcgtccgccgtcatcacccagtagagagccggggagatcatgcgggaaagcggtatcttggcactggcaatctgcccctgcaactgctccaccgccgagctttcccatgcgtccatgaagggagaaaggtagttctcaagctccgggtacgaggtcaggatggggaaaatgtcggcatacttgcggttcaggaactcgatggcatgggggaaggtgcaatacttgccgttcttgtagattttgagataccatataatactggctaacagaatgataggcgattccacgaagaaatcgccctgcttggaaatatcgggtaagtcaagggcattactgcccccttctcccctaagaaccgtacgtgagagtttcccctcatacggctcaagcaactcaatatttctatttgttgttagaaatcggctcatactttcaacagtttcgtttatttcgcttgtagcagttgttatggacaagttgccgtacaattgaaccaccaacagatatttcattgacgttccatgcttttgtacaatctatctccttgccgcataacggacaagtccgcttctgcttgttccataaatataagagtgacttacgtcctttgagagattccagcatttgttgctcctttcgctgaaagaaataatcatcatattccgggtcgaaagggtttgcctcccccttgacttgcttgtacggagtataatgtatatccgacaaccttttaagggtcaggtagttcactttcttgctttttgtttcatatttccatgcaaacgtccatttacgcccccgaatttcatgccaatacttatctgcaacccaagacttgcgtttctttgggtggcgacgtaaagcccatttctttgtgaggttgtaaatgtgattgtcgcaaccgtgaaaagcattggttgatgcaccatatcggtaatagtttccccaacctgttatcacaggattgagcattcgtatcagcgattcctgcttacacattttatgtcctttaacgatgtcactgatttttgccctaaagcgtttctgtgcatctttggacggagatgtgtacagccttttgccgaacttccttacattgaaacctaagaaatcaaatccatcgtatatgttcgtaatggtagttttctcttcggataaggtaagacccctttctttgagaaattctatcaccattggtttgacctcgttttccaataattccttatctcgacctgtgattataaagtcgtccgcatacctgataagattcactttgtagtggaatgtcttatagttgatgaaacgtcttttgaatctttcagccaagagtggttgaagtccgtcaagtgccatatttgcaagtgtcggtgatatgatacctccttgtggtgtaccctcttctgtcgggaacagtttaccattgaatacagctccacatttcagccattttctgagtattgttttatccatagggatattttcaataagccagccgtgactgatgtggtcgaagcaacccttaatatctccctccaaaatccattcgggggaatgctggcgatttagaaccgtatcaatctgacgaattgcgtccattgtcctgcgcttctttcggaagccgtaagaaaaacggtcgcctgtcgtttcggctatcggttccaatgccatgagatataatgcttgcatcgccctgtctttcatggtcggtattcccaacggtcggagtttaccgttctttttcttgatgtgaaccctacggagcggctgtggatggtagccacgacgtctaagttcaccgattgctttgtacttgcgcttgggagagtcccaaagctgtttatctactccagacgtattcttccctttgttggaagtaaccctctttactgccaatgccttggcgtaaaaagagtgggtaagcatccactgcaaggttttcaccttgttatgtctgccttctttctgagcctttacaatacgcgcttgtagctttcggacataggtttcacacttagaccagttcataccgtcccaagtcagattcctgctgtcagcaggcgcacacgatgttttaatctcgttcatttgctttcctccttttgaaagttctaaaagttatcttgtaaagagttaccatatacggaagtctgcccactttcgtgtcggatgatgttaccctcattaactcgtgatgttggttcaatccgtatcctccccattacagggcggcattcgctttctccgttatctcatacctgcaccccattcggcttgccttgcggttcgcttactcgcattattacgagagagatacaggcttgccctgttccacgcaattgacaaacggatagtttaggttctgccaagtccgccggcagtgctatgtccgtgtaaccccaacatgggcgagggttatccgactgcttaccttttggtgagagctaaagtatcttgcgctccttcaaaccttacgacggctaaagtcagttcacattacgttaaccatgctatccagcctcgccactcgacggtatgatactaaccgcccttgacgttccctcacggttcagtcttgtcctttcggaaagtgtactttgtcctataagcttagcacaacccatcactggagatgcaccttatagtaggctaccgctgacggaacagcgggttaaatcttgcaatatacattgctgtttaacaatcaattacgtgacttttcaggtcacacccatgtgcggttcaaatttaacattatcgtgtaggcactctcgtaggcatcgctgatgtcggtcatgaagtcgggatggatggggttgcagcggtggctttccctcggattgtcgaagtttatcacgtagaacttgggcttgaccttgtagccgtccaagtgggcgagtaggtggttgtaggctatctcggcgaggtcggggtacttgaaatcatacaggaagagcgaatagcccttctcgatgatctgtttgatgtactggttgattatcgcataggacttgcccgaaccgggcgtacccaagaccatcgtcgcacggaagggattgacaaggttaatccatccgtcatacgcccttcccctgaaccggaagcgggtgtggagattgacagaatactcgttctccttcagtttggtttcctgcatgaaggattcgttctcgacgttgaacacgtcttcgagcaggtcggtcttcagcaggcgtgacatccacagccctgccatgagcaggcagatatacccgacggtaagggtggcgatatacagcacggtgtctgccggaagcgacagaggaagggcgagcagccaccagttgccgaaaaagagcagcaagccggacacgccgcaaaggatgatcctgcgccacgtgattttctgctccttcacgccctttgtgccgaggcagctaagggcgaggaacagcacggcgaagagcttcgtccagagggtattggagaacagcccggcggtacgctggaagccgagcaatatcctatcgaccacgccgatgtcgatgccccattcccggacggactggtaacagaaccaataaatattgatgactacaaataaaatgcttatcgcacgcatgaactccatgactttggcgagtccacgcaaatcgtcttcgttttgcataattcgttgaattttaagttgattattgttgcctgccgtacttgcgcctctttttctttttgcgctgcggcggtacgggctggtcaccggacgctccgccgggtacgagggcaaagaggttgaaggaggccgccacgttttgggtagtgccgtccttgtggtcaggacgatagccggtatgtccgtcccattgggatgcgcccgtatgctcctgctgccgggtgggatgttccactccggcggagggttgcggcaggtgaatgccttcctgcccggcgaaaaggtcgttgaacacgcctgcggaaaactccttgcccagacgggagccgttgaagacggctttggcggcatggtcgatgaaggtcgccccatagatgcgcccggcttcattctgacggaataccacgccgattccctgccgcatgagttcccgctcgaactgcgcccggtcatgccctgcggtctgcatggcggctgcaacctttccggcggtggcggcggcgacctccttgtgggtcttttcccatgcggcagcgttgtgcatccgcctttcgagggcagcgatgcccgcctccttgccgaacacggaggacttgaagggcttgccgaccttgttgccctccctgtcagttgccgaataggtcaagccgtgatactcccgcccgccgtattccccctttacctcgtccaccgtgatgccgtaaggggaaagcacggcacggtattcgcccaatgtacggaaacgccactcccgggcgagcgggcggatgactcctgccaactgtcccttgagattgccgtccccgtaaccgacgggcgacaagggtagtccctccttccactgcttgggcgtagccgggacaagaccgaactgccgttccagctcccggcagaccttcatcgaactcccgtgttcgtagctgtcggaaatcgcccgcccggtttcgtccacccggacggaaacgatgtgcaggtgctcccgcccgatgtcgttgtggcgatagacgatatagggctggtcgccgaagcccatgcgccgcatatactcctccgccaagctgacaaaccgctcttcactcaagcaatccttcgggtcgggattgagggagatgtgcaggacgggcttctcggtcttgcggttggctgtgaggtagtcaccgaacgagcgggaaagatgccctatcgtgtaggggttatcgccctgcggctcgataatccggctggtgaaaagcacgtcggcgtgccgttcgtccaccttcaactggttgtaggcaagcaccccgtacaggctgctgccgtgcgagatcttggctatcatcggacggggtatttgctctggaactcctccaccagtgcggaaatccgcttgcttaactcgaccagttcgagggtgtgccgctccagcttgtagaggaaagcgagggctttcttctccgagaaattggatttgagcgcacgcacgcattggttgtagttcgtgcctatggcacggaactgcgagtggaaagtggtcaggcgcatgtagaaatcctgcgtccccttatccagtttaataaccttaatctccttgccgaaaagtgcggaaacgataaactccgccttggtcgccttgcccgactcgtcgaaaagcgcgaggaaacgggcgttgtccccgtcatccagacggaatacgtagcggtggcgcatcttgtcgggcttgggttttcgcccgtggttgcccgcatacttcttctgattgtccatcatcctgtaaaattttaagtgaaacatggtctgaaaacgccgtatgcctacggctctcccccgtgagcatcccccgactccggaggggaatgccacatcgagggggcaaggtggtggtgaggcacgaaattcatttcgagtgccgcagcacacaacttgccattttcgtttgaaaataaaatccgtcctgtcggacagattggggatgcccttgcctgctgtggagtgccggggtactccctcgggcggttatctctcttctccattcttactctttttttgtttccgcctgcaaagtaacagcccttttcccgtccggtcaccatgcccggatgcgacaaacctacgggtgtaaggacaatgtgcgccacattgataatcagctatataatccatcgataatttactattcttttgcatcgtgaaagcaatcagacagttgtccggaaggacatataaacaggcggtcggacaagtgaacggctgaccggataaactgccggacagatgatggttttaccggacggttaaacgtttagccggataaatggctaaacagctaaacggtcaatcgggcggttggatgaccggatgaacggctggataaatgaacgaatgaatagagaaatggctgcataggcaaccggatgacaaactaactgaatgacgatatggacagacagacattaaatgtggctttcgccacacaaaaaggcggcatcggtaagaccgccctgactgtactggtggcaggttacctgcactaccgcctgggctatccgctggcggtgattgactgcgacttcccgcagtacagcctgtacgagatgcgggagcgtgacagccgggctgtactggagaacgaatacctgaaacgggcggcttacgaacagatgcggcaaccggggcgtgccgcctatccggtgctcaagtgccgggtggagcaagcccccgatacggcaagggagctggcaacagaaaaccgctacgatctgcttttcttcgacctgccgggcacggtgaactcggcgggcattctacgcacaatcgcacagatggactacatcttcgccccgataagtgcggacaaggtggtgctggaaagcacactcgctttcctcgacgtgttgcagcggatgatgttaggtaaagaaacaacgagccgtttgaaagggctctatcttttctggaatctggtggacaggcgggaaacaagcgggctgtaccggaaatacgagcaggtggttgctgaaatggggttacccatgctacagacacgaatcccagacacgaaacgtttccgcaaagaggcggacagggggaatcggatggtgttccgctccaccttgctaccccctgacaagcggatgattgctggaagtggcatccctgaactgacccgtgagatattatccattcttaaactgggagattatgaagaagcggtggaatgaggaacctatcgacgaggaactgctgatgcgaatgatggcaggcgaaaaggtgcgctctgacgggaatggcggtgcggaggacacggaagagggggaaaccgggagaaggggaactgctgtacccatggagaaggtgcggggagggaaaacggcgaacgcgaaacggtgcaagccaaggcagacttcggactatgaaacgacctacctcaaaggtatggacattcctgcccgttacggcaagccggtctatgtgcgacgcgagtatcacgagcgcatcgccaaaatctcggtgatgctgacgggtggcagggtgtctctctcggcatacattgacaacgtgctggcgcagcatttcgagcagtatcgggaggagatcgaggaggcatacgccaggaaactggaaaacttattttgaaaagaaaggaggagacgatgatactgaaattattgttccttgccctgacggtgtactacatctgggtattttggaaatattaccggcaggatattaccgggctgttcgaacgtacggaaaagtacgggacggaaaaggagccggaacaaccgggtgagccgtacacggtcatgggcagaagtacttaccagacctttatggaacggaacgaggcgggggaagaaacggacgatgcccggaaccaaacgggtggaaacgaatctaaaaccggaaacgtggaggaatctggaacggcggacgacggggcggattactccgacatcgagccggaagaggacgaggaggaggaatacgtgcccacaccagaagaggttagggagttggaggaggaagaagaactgggggcttattatccggacggcaatcccgatttcgccacgggatactccttcgaggacctgaagaaggtacaccgggtgctggtgtcggacgatgcggacgaaaaggcggaacgggaggctcgtgaggtgttgccctcggtgatggggtcggatatctgggaaccgatgctggatgcattcgagggtgcacggcagcgtgttgcccgactgatgaaaaatcataatgtttaactaaaaatgttcaagacaaatgagaaaaaagaatttctttttgattgtagcctgcctgacggctgcaatgggtgctatggcacaaggaaacggacaagcaggcattacggaagctacacagatggtcacctcgtatttcgagccaggcacgaaattaatttacgccattggtgctgtggtagggttaatcggaggggtgaaagtatatggaaagttcagtagcggggaccccgacacgtcaaagacggcggcgtcgtggttcggagcctgcattttcctgatcgtggcggcgactatcctgcgttccttcttcttgtaaaacttcggatcatggacttggaaatcaataaggggattggcaggaacgtggagttcaagggactggaaagccagtaccttttcatcttctgctgcggtctgctcgccgtgttcgtggtattcgtcatcctgtacatggcgggtgtgaaccagtgggtgtgcattggcttcggtgcagtttcagccacgttccttgtatggctcaccttccgcctgaacgagagatacggtacccatgggctgatgaaggcagccgcccgaaagcggcatccgagatacgtgctgaaccgcctgaaatttccccggttattcacctttaaacattggaaaaaatgagaaatgtaatgaaagcgacaacgttggaaagcaagtttccgctgctggcggtggaaaacggctgcatcgtgagcaaggaggcggatgtgacagtcgccttcaaggtggaattgcccgagttgttctccgtgatggggagcgagtacgaagcgatccattcggcttggcacaaggcggtaaaggtactgccggattactccatcgtgcataagcaggacttcttcatcgaggagaagtaccggccggaaacggacaaggatgatctgagcttccttagccgctcgttcgagcgacacttcaatgaacgcccattcctgaaccatttctgctacctgttccttaccaagacgacgaaggtgcgcagccgtcaggagagcaccttcagcacgctgtgcaagggcaggattatcccgaaagagatagaggacacggaaacggtgacgaagttccttgaagccgtcgggcagttcgagaagatcatgaacgacagcgggttcgtcacactccaccgccttgcgacggacgaaatcacggggacggaacggtccgcaggcatcgtggagaagtacttctctctctcgcagggcgacacgacggtattgaaggacatccagctgaacccggaggagatgcgtatcggcgacgacttcctctgcctgcataccctctcggacacggaggatctgccgggcaaggtgggtacggacagccgttatgaacggctctcgaccgatcgttcggactgccgcctgtcgtttgccgccccggtgggtctgctgctggattgtaaccacgtgtacaaccagtacattttcattgatgaccacacggagaacctgaaacgcttcgagcagaccgcccggaacatgcactcgctctcccgctactcccgttccaaccagataaacaaggcctggatcgaggaatatctgaacgaggcacattcgaaagggttgacatcggtgcgttgccactgcaacgtgatggcatggagcgatgaccgggagaagcttagacgaatcaagaacgaggtgggcagccagctcgccctgatggagtgcaagccgaggtataataccgtggacgtgccgacccttttttgggcggcgataccggggaacgaaggggacttccctttcgaggagagtttctacacgttcatcccgcaagccctgtgcttcttcaccgaagaaacgaactacaaggactcgctctcgcccttcggcatcaagatggtggacaggatgacgggcagaccgctgcatctggacattagcgacttgccgatgaagaaaggcgtgatctcgaaccgcaacaagtttgtcctcggtccgagcggaagcggcaagtcgttctttatgaaccaccttgtgcgccagtattacgagcagaacagccacatcgtactgatcgacacgggcaactcgtatcaaggactgtgcgagctgatccatcgcaagaccaagggcgaggacgggatttattacacgtacacggaggagaagcccattagtttcaatcctttcttcacggacgactacaagttcagtgtggagaagaaggacagcatcaagacgctgctgctggcgctgtggaagggcgaggacgagaaagtcacgaagacggagagcggcgagctgggcagtgcggtgtcggcgtacatccgcaggatacagcagaaccggagcatcgtcccctcgttcgacaccttctacgagtacatgctgaacgattaccggagggaactggctgcaagggacatcaaggtgagccggaaggatttcaatatcgacaacttcctgaccacgctcagacagtattaccgtggcggtcgttatgacttcctgctgaactcgaaagagaacatcgacctgctacacaagcggttcatcgtcttcgagattgatgcggtgaaggacaacgccgagctgttccccgtggtgacaatcatcatcatggaagcctttatcaacaagctgcgccgcctgaaaggggtgcggaagatgctgatatgcgaggaggcttggaaagccctttcctcaccgagcatgagtgagtatttaaaatatctatacaagaccgtcaggaaatatttcggcgaggcgattgtcgtcacgcaggaggtggacgacatcatctcgtcccccatcgtgaaggaggctatcattactaactcggactgcaagatccttttggaccagaagaagtacatgaacaagtttgacggcatccagtcgatgcttgggttgacggacaaggagaagtcgcagatactctccatcaacctcgccaaccatcccggacggaagtacaaggaggtatggatcggtctgaacggggtgcagtcggcggtgtacgccacggaggtgtcgtccgccgagtacctgacgtacacgacggaggaaagcgagaagacggaggtgttcgcactggcggaagaactgggcggtgacctggaacttgccatccggcggctggcggaaacaaaatacaagtgattcaaatcatttaacaaccaataaaaagaaacagtatgaaagaagaacctatgtaaaagccatccgtatgggttggggcgaaggaagtgtctatttttccacggaacccggcacaacaccggacgaatatgtggatgagatctgtatgacgcaggagcataccatcatgggatggatatatgtttttaagggggtaaaagacgggcgtaccgttttcagcatgtacaatgcgaccaatgtcaccctctattacaagactgtggaagtcgaggaatagccggagcaggacggttggctgcatgctcaaatgtccagtcagctaaacagttgaacggccaaatgtccaaacgattgaacatgcaaacggctaaacggtatggaaaaaagactttttgtaaaactttaaaatagaaccaatatgagacgattgaatctgatcctgctgctgtctgcggtgacggtggcactggcgtttgtcatttcctgcaaggaaacaagcgcggaccggttgaaaaagatgtgcggcgagtgggtcagcacgggtagaaagccccccttcaccctttgggaagagaacggccagtaccatgtgaccgtcacacacagtaactacaagggtgatgacaggcaggaaacctacctcgtccgggaaacggaaggggtattgttcattgaaacgggcttcgccgtgatgatggactatgaccggaagaaagaccgcatccggctgtctccgggcggtgaatacaaaagaaaaagtaacgaaaccataaaaaaataagaatatgaaaacagtaaaagcaatcattgtgggtatggtgtgcctgacggcaggtgcggccaacgcccagtgggttgttagcgaccccggcaacttggcgcagggcattatcaacacgaccaagcagatcgtggaaacctccgccaccgcccagcacacgttggacggtttcaaggaaacggcgaaaatcttcgagcagggacggaagtattatgatgcgctcaaggcagtgcatgacgtggtaaaaggcggcgtgaaggtgaagaagtccatcgatctggtggcggacatctcggaaatctacgtgcggaactaccagaagatgctcggcgacccgaactacacgccggacgagctgtcaaccatctcgttcgggtacgccaagctgctctccgagagtgcggacatcctgcaagacctgaagaacgtggtgaatgtgacgggaatgtcgctctcggacgccgaacggctggcaatcatcgaccagagctacaagcggctgctggaataccgcaacctcgtacagtactacacgaacaaaaacatatcggtaagttacctgcgggcgaagaggaaaaaggacaccgaccgggtgatggctctctacggggatgcggaagaccgttactggtgaggctggcaatatatgataatacatgcgtacatatataataaaagtataggactatgttgttagcgatagacttcacgaacctgcacgagatattgcaggcattgtatcaggacatgatgccgctctgcgagaagctgacaggggtagccaagggaattgccgggttgggtgctttgttctatgtagccgccaaggtgtggcaggcgatcgcccgtgccgaacccattgacgtgtacccgctgctgcgccctttcgccatcgggctgtgcatcctcttcttccccaccttcgtcatcggcacgatcaacacggtactctcgcccgtggtgaagggttgccacgggatgctcgaatcacagaccttcgacatgaaccggtaccgggagcagaaggaggctctggagagagaggcgttccggcgtgacccggagaaggcgtatctggcaagccgggaagactttgacaagaagctcgacgaattgggctggtcaccgaaggacttgaagacgatggcggtaatgtacatcgaccgggcggagtacaacatgaaacgcaatatccggctgtggttccaggaactgctcgaactgctgttccagtcggccgcgctggtgatcgacacgatacggacgttcttcctgatcgccctctccatactgggcccgatagcattcgcgctctcggtctatgaaggattccagagtactctgacgcagtggatcacccggtatatatccatctacatgtggctgcccgtgagtgacctgttcagctcggtactggcacgtatccaggtcctgatgctcaccagggatatcgaagcgatgagtgacccgtccttcatcccggacagttcaaatgcggtttacatcatatttttaatcatcgggatattcgggtacttcacgataccgaccgtctctaactggattatcatggctgggggtgtgagccaggccaaccgtgcgatgaaccagaccgccacgaagataggcaacgtcaccgccgccggcgccggtgcagccgtgggcaatattgccggacggatcatcaagtagtacggactttcccgagcatacgaatatacgaatcataacaaaatgactggaaaaatggaatttaaaagtttaaggaatatagaaacgagcttccggcagatccggcttttcctgctggtcttcgccgggctgtgtgccctgaccacgggtgtggtggtgtggaactcgttccgtttcgccgaagcgcaacgtcagaagatttacgtgctggacaagggcaagagcctgatggtggcgctctctcaggacatggcgcagaaccgcccggtggaggcccgggaacacgtgcgtcggtttcacgagctgttcttcacgctctcgcccgacaaggtggctatcgaggggaacgtccgccgggcactcttcctgtgtgacgaaagcgccttccgctattacaaggactggcaggagaagggtttctacaaccgtatcatctccgccaacatccaccagagtatccgggtggacagtgtgacatgtgacttcaaccgctacccttaccaaatgaagacctatgcccggcagtacctcacccgggcgagtaatattaccgagcgcagcctcgtgactcgttgcagcctgatcaactcggggaggtcggacaacaatccgcacggcttcatgatggaacagttcaccatactggagaaccgggatttacgaaccgtcgaacgctgagaatcatgaaaagaagaatcatcacaagaatacaggattgggcggatgaaagcctccgccgtctgtgcggacgcatcacgcctgacgtacgtgtgaccctgatcgtgatcatgctgctactcttcgggggagtgtcggtctatatgaccgtatcgtccatctaccgtatcggcagggaggacgggcaacatcaggagaaagaacgtgccggaaggctcagactgcggaacgacagtgtcatcaaccctttcattggtttggaccatgggactgtcggagaggattagcggatggctgcaacgccggaaggaggcggtgcatcggcaacggatataccgggcttcggcttacttcggcagtctgttgaaacatggggaggcggacgccgtggcggtgcgccggtgcgtggaagactataaggacttcccggaaatgacgaaaaggcaggttgaactgctgctggaacacgggagcctgtacagcatccgtcaggccggacgcccggagtggcaggcggtcattgaaacgctggcaggtacctgttacgggcggcagaccttggacggcacccgccacagcgtggcggaagaggctgagaatccgctctccctgctgttcgcccggtacgaggtgctgagagaggggtacgagaatcgccgctacaagcccctgcttccgacttctgaaatacaggcacggaggaatgaggctcaccggttgctgaactaccgcatgagagagagcgacctcgccgccctgaaggatcttgcattgaaagggaaaaggcccgaggattcggtcatcctacgtcacggtctggaaacgggctaccgggaactcgacggcctgcaacgccagtggagggaagagcgcatcgatgatgactatcccggcatggaacagactgaaaggcagatggatgccgggcgtggctcactgatgcggcaagctgccgccctttacgaggagaaactggctggcaggttgcccggggactacctggaagcggtgagtgatgaacggagaatgcttcgggaactcgcccggaacggatggagcgagcgggtggaaatccccagggaaacactggtcaagtacgggctggcggaagttttttccgaaatcgcctcgctgcggtggaactaccacctaagccaggacaacggcgatctttcccgtgaatacccggcagccgccatcgaccgtcacagccgtacaattcgggaacaggcagcaagggaggcggaaaagctggagaaacggctgttcctcacgggggcaggacggaagggacacgctatcgtcctgcggactgacagccggatacgaccggaagatctgttccggcgggaacagaaaaacaggcggcaggtggatgacacggaacaacggaagcctgtccggcgagtaagaaaattttaaaccaataaagaatatggaagaaaaaggaatcagacaagaggaacgtgccacagccacgaccgacatgggaaaggaaggcatcacggcacaggaaaaccgggaaacgggcgtaagccctgccggaaaggagaaggaaagacggaagagggaacctgaaaaaccgctcaccccgaaacaattgcagcagcgcaggaaactgctggcctatccgctgatgggattgttgttcctcggctcgatgtggctgatattcgctccgtcggaccaaagggacagagttcagcagggtgtcggggcatttaacgccgagattccgctgccacaggacgagggcattttggatgacaagcgcacggcttacgagcaggcggagatggaacaaaaccggaagcaacgggtacgcccgttggaggatttcgccccttcggaggaggatgaaccggagggtgcggtagcggagccgccaggcagcaacccggaacgggaaccgttccgggactattcgggcgaccgtgacgatcgctcttcagtcgccgcttaccgtgacatcaaccgccaactcggttcgttttatgagcaacctcaggcggacggagaaaaggaggagctgaaaaggcaggtggaggaactgaccgccaagctggaagaaagggagcggcaggcgggcggaatcgacgatcaggtggcgctgatggagaagagctacgaacttgccgccaagtatatgggacagaacgggcaggacggcgcagccgtgcaggtgcccgccaccgggcagggcggaaacggtttgggacagcctaccgtggcggtacaggcggcacgggagcggacggtatcggggttgcaacagaccataagtgatgcggagttcatgcggcagtacaaccagccgaggaactacggcttcaacacggcagtgggcagcgggtacaccctcgggaagaacacgatccgggcatgcatccatgaagaccagaccgtcatggacgggcagacggtaaggcttcggctgctcgaaccgctgcaagcgggcaacctcgtgataccgcagaacaccctgatctccggcacaggaaaggtgcagggggaacggctggatatcgtggtgtcgagcatcgagtaccggggcaacctgctgcctgtggagctgacggtgtatgacagcgacgggcaaaaagggctgtccgtcccctcgtcgctggagcaggaggcagcgaaggaggcgatggcgaacatcggcgcagggctgggaacgagcatctcgttcgcacggagcgccgggcagcaggtggcgatggacatcacccgtgggctgatgcagggtggcagccagtacctcgccaagaggttccgcacggtgaaggtgcatttgaaagcgggctacgggctgatgctctatgccaaacagcaataacggaaaacgggatatgaatcatttaacagagtatgaaccattaaaaagtaaagacaatgaaaagatttttgggattggtcgccctgtttgtgggcgcagtcatgtgcgcaagtgcacaagtgaacgatacgatacagcgggttgcgggcaacgacctatatcaggggattacacggaagttaccctaccggcagatggtgactccccacggggtacaggtgacgtttgccaagacggtgcatatcatcttcccctcggtggtgcggtacgtggatttgggaagcaattggatcatagccgggaaagcggacggtgcggagaacgtgatccgtgtgaaagcgacaaccgaggggtttccgggggaaacgaatttttccgttatctgcgaggacggaagtttctattcattcaatgtccggtatgcgcatgagccggagatgctgaacatcgagatgaaggattttttagagaacgaggacacgacggacttttcgcatacccccatgaacatccatttccgggagctggcaggcgaaagcccgctcttggtgaagctgatcatgcagagcatctacaaagaggacaggcgggagatccggcacttgggctgcaaacgcttcggggtgcagttcctcctgaaatccgtccactcgcacaacgggctgttctatttccacacggaaacgaggaacaggtcgaacgtagctttccagacggactttatccggttcaagatcgtggacaagaaagtgccgaagcgcaccgccattcaggaacgggtgatcgacccggtgcgcagctacaacgaggtgctggtgacggaggggaaaagcgacgtgcgtacggtgtatgccgtcccgcagttcaccataccggacgacaagctgctggtcatcgagctgttcgagaaggacggcggcaggcaccagaccatccgggtggagaacgccgacctcgtggcggcaaagcagattaacgaactgaaaatcaaataagagatgaaaaggttactgttcattatcctgcttttcggggtgtgcctgcatgtgaaccaggcacacgcccaacggtgcttacccggaatgaggggcatacagctcacgggcgggctgtcggacaacatgcgctggaaaaacggcaacggcttcggctaccacgccgggatagcggtgagtgcctacacgaagaacgcccaccattgggtggtcggtgcggaatacttggagaagcggtacggctaccgggactgcctctatccggcgagccagttcacgggcgagggcggctattacctgaacttcctttccgaccggaagaagacgttcttcgccgcactggggctgtccgcccttgccggatacgagacggtgaactggggcgagagcctgctgccggacggctcccggctcacggatgaggacaatttcatctacgggggtgcgctgacgctggagctgtccgcctacgtgacggacaagattgtcttgctggtaaacggtcgccaacgggtgctgttcggtggcgactgtgggaagttccattcgcaggtcggcgtgggaatacgttttatgattcgataacaactgattgattgcaaagtatatgaaaaagataatctatcaaatgctcacgggctgctacatcgtggccgccctcgtgctggtctcagcctgtaacgacgggctggatattcagacgaaatacccgttcacggtagagacgatgcccgtcccgaagaagctgaaggtgaacgagacggcggagatacgctgtgaattgaaacgggaagggcgttggaaagatgcggattacacgatccgctggtttctctatgacgggaaaggcacgctcaaactggatgacggcacggtgctgctgcccaatgagcattacccgttggaaaaagaactgttccggttgtatttcacctcgttgtcggacgagcagagcagcttgaaggtgtgggtagaggacacgttcggacagatggtggaagtggagttttcatttaataatgataattcggaaaaagagggagagagatagcagtgatggagtatttgaaatatttgggaagcaacgggagtgacgagaagtacacgcctcgttatgcggtgctgccgatcatcaagtacctttcccaaaaagcaagggtatggtgtccgttcgatacggagcacagcgaatttgtactggcattgaaggagcacaagtttaaagtcgttcattcccatatttgcacgggacaggactttttcgagtatgagccggaacgttgggatgtaatcgtttcaaatcctccgttcagtaacaagctggcggtattcgagcgttgccttggttttggcaaaccgttcgccctgttgatgtcaaacttctggctgaacgattccgctccctgccggctgttcaaggacaaagaactggaattgttgctgttcgacaaacgggtacagtacaatgacctgaacagggtgccgttcggttcgagttacttctgccacagggtgttgccgaagcaaattatctttgagaacctcacggtggaaaagaaattgagccggatgcataatgatatggatgaaattgtgaaatcattaaccaaatgtagagataaaatagaatggaagaaaaaatgaaacaagttcccttggaattcatatgcaggcacgaccgcacggcgggggtctgccgtgccgccgttgaagaggacggctggcagctggagaacgtgcccgaagagatgaagacaccggaactgtgccggaaggcgctggaaacggaagcgggattcgggaacgacttccaccgggggctggttcagcatatcccttttgcggaggtgtgcatggaggtgctgaaggagtgccgggagaataacccggaagaactctacggggtggcggtggctatccgcccggaggtgatgaacggcgaaatggcggacttcctgctgccgctggacggcaggtgtatcagcatcctgcccgtgcacctgcaaacaccggagcgggtgcgggtggcggtggaaacgtcggggatgtccgccatcgggcgtggcggagtgccgaaaagcctgctcacgcccgaagtgtatgtcaagtgtgccgcccacagccgggagtcgctgatgatgatcccgtgggcggaacgctcgccggaggtctgcctgatggcgaagacgctgtacccggacatagtgaagaatcacccggagttcgtgccggagagcgtgcataaccaagacagcatctacacgctgaacagactgatggaaagtctgacgggggaaaagttcagctaccggcaaatgactgacttctacaacgggaagccgctgaatgttaaacggatggagacgccggacggcgtgcagaaggacaaggcggtgaagttcgacaaggagacggagaagttctccttctccgacatccggcaggagcggaaacggggattgaagatgtagcgtgagccggacgaaatggaaagcatccttcgggatgctttttccatatccgacctgccgccttccggtttcttttgcttcttgttcttttcccgccccgctcacgaaagaaaagaagtgcaaaacggatagcgaacaaaaaaggggacgcttaaagcatcccctcgtccatgtagctgaggtaggtgtcctcggtcagtatgatgtggtctaaaagctgtatgccgattgcctcgcagcctttcttcaactggctggtcaggttgttgtccggcgtgctcgccacggtcgagccggaagggtggttgtgcgagaggatgattcccgaggcatgagagacgagagccgtctggaggacaatgcgtatgtccaccaccgtgctgttcatgccgctgcgtgagacgcacgaaacgcccagcagcctgcctgcgccgttcaggtacatcgcccagcactcctcgtggtgctgcatacagtcctcgtagaaagtcttgaggatgtcgtaagactccttggaagagtggattctaactctcttggatgcgtcagcgtccttgtaacttacggtgatttgagggaaagacagtgtattcataatgcaaaaaattaaaagtgaaacatttattttttgctttggggcacggggaaagaacggacttcatgcaaggcttttgcgtggaatacgacccgaaggtgtggagattgtgcgcaaaaccgtcaggttcagccttgctacttgtccgtttttccccgtaggtttgctaaaaaatgagtgtggagcttggctaaaaaatccggtgagtcgaggggtttctttttgcttctttgtcttttcccgcccacggctcaccgaaagaaaaagaagtgcgtccgaaaatgggtcaatcctttcccacgggcgggtaaaaaaagaagtccgggcggatcgctacccgtcccggacttgcggcaatgaaacacaagggggggaatgttatggcgtgatttcccccgttgcgattaggtttccgtccgaataatactctatcttcccgtaggtaaagcccatgtcgggaatggctacgaaagcgatatagtccgaatactccctgcctttgaggttcttcccgacaaggttgttgaatatcatggggatgctgcaaccgtcctcgctgtgaaggacggttctcccattctgtctgatttcccgcttcatgccgtttctatgaaaagtgtcccgtcgataaggtactcacaattattcttgtggctctcgtccgtgaaatattcctcgctctcgcaatactcgcaatcgtcacggcacgagcggaagaagttttccagacagtcacgcatgagttccttgaaattccgtgtgtcgggcgagcgcatgaagtccatgaggggctgcaagatgatttcgtccgacgcaacccccgtgaaggggcattcgcaagtgacggagatacggctcctgcgtcttttcttgcggtctttcgtccaatagaccttggggttgtacagctccgcatggaagttgttatagaggtaagccagcaagcggacgctcgaaagcctttcggtctcctcctcgtgtttggtatggaaacggtaagcgtatgtgcaactgtcgtaacagtagttggtgcaggcaatgcggaaaaggttgcagaaggcttcgagcgtgtcgcagttctcggaagcatacgggtaatcgtttcccttggcaagccagtcggtataggctttttgacgggcttcgttctccagttccgcaatgccgaatagtgtataggttctctgtacggttcgcataagtttgaaaatttgaaagtttaaaaatcggtttctttgctatctttcttttccgccacggctcacgaaagaaagtagcgggcggatttctccgccctgccctttgtcttcaggctgcaatctcttcgggttgcggttgttcctcgggttgcgttatcttgcgctcccttgcccgttcctgcactaataggacggctttcttttcctcaatgcgctggtgacgcttctcgtacaccccgttgtactccctttcgatgttggcgagttcctccggcatgtgcctgcgtgcgaagtcaagcaagagggtcgccacggtgttgttcccgtacgctcccttgaagttggctacaaggaagtccctgcggatgatggtcttcatctttaccgtgaggtttccgataatccccatcttgtcctcgtccgtgatatacggcttgtcttccgcaatccccacggctgcgaagtgttccttccggagcgaggacagaaggaagaagtacagcatcgtgtcttcatcggcactgaacttgccgcccgtgatgtcggcttcgagaatctgtttcttggtgtcctccaccgtgcgttcgagtgcgatttccttattgcgctcgtcctgcttctccaatttctccacgggagagagcggtgcgggtgcgggcgttccgtccgctgtctcggtctctgtctctgtcatgttctccacgtaacagaatgtaatctccttctgcccgattttggcatagacggtgatttcccccgctccgctcctgcgggtgatttcctcctcctgctccatatagtccgcccattgctgctcgtagcgggtgcgggcttccccgtagcgttcggggtcgttgaaattttcggctttgggttctttggggcagcttggaaaggcggtgtacctgtcaagggtctccacctcgtagcccgaagcggttagccgttctaccaccgtctcgttggtggtgtagcggtcacggcagagcgacacctccggctggttccgcatgatttgcacggctcgctccatgaggtaggatgcgttcatctcggcaaggcatgtgcggttggcgcaatgcccgcacccgccgtcatggaacaacagcaagttattggtgttgtgtgcgcacgtagcgcactcggtcttgtcgaagtggtagtattgcaggtcggtggtgaagttctgttcgatgcgccttgcgacatcagcggctttcagtccccgccaactgttgtacgttccctcgtcctgcaaatgtttctcgtacacctcacgctgaatgtcttccccgtatcggcagatttcagccgccacgctgatggtgatgtaatcggtaattttgtatcgtcaaaaatcggaaaagtaaaatcgacaatagaataaaagaaaatagcattgtaaattagagttgtcaacaactaatcacaatgctatgagtgagacttccaaattacagaagtatctaatgtggtacaaagttaaagaattattttcaaatggcctaaacaagagtcaaataggcatatcattaggtcttcaccgtcaaacggtgtccaagtatctgtctatgacagaagaagagtttaagcagagtcaaagttacgagcgccgatacagccataaacttgatgattatgaagcttatgttatcggagagttacgcaaatggccatttttgtcatctccgcaactccatgaccgtttacgggaacattttacagaccttccccatgtcacagctaaaacggtatccaactttgtcaaccgagtacgtctgaatcataatctgcccaaagaattggaaaagagttaccgtccttatgagaagcaaccggaaacaccttatggtcaatatgcccaatgcgattttggagaacgctggatgaagacttcgcaaggcatacccttgaaagtatatttttttgcaatgagtcttagccgtagccgttataaatttatttatttcagccgtaccccgtttactaccgatcttgcagtttatgcccacgaacttgcctttgaatatttctcgggagtacctcggaaaatagtttatgaccaggacaaggtttttcttgtcaaggagaacctaggagacctgatacttacccacggctttcgagccttggttcgtgaacatgggttcgagccggtgttctgccgtaaatcagatcccgaaagcaaaggaaagatagagaacgtagtgaagtacgtaaagtacaattttctccggggacgtgaatttacctccatagagcaactcaacgaggaggttcaagcatggttgcaacgtactgctaacggtatggagcatcatggcatacgtcgtatcccatcagtggagttcgagatggaaagaccccatctcatgccttatcggggaattccgacaatcccttccccaaagcttttaccccatcatgtcaggaaggataacgtgattacctacaaggggaactattacagtgttcctacaggtacctaccaaggtcaccgaacacaggtatatctggaagaaaaggaagagatgctgtatatttacagccttgaaacagggaaaaatatagcagcacacaaaatctgcaaagataaaggacagttaataagtaatacctcacatcggcgagaccgtgaagctgccttggatgattacgaggctactgtccgtaaaagacttcccggggatacggtcattgatacctatttatctgaactacgcattcataagaatcgtaactatagagacaacctgcagtttatacttctccgatatcccttctatacagaacccacgttgatagaagcctttacaagatgtttggaagtgaaggtctttaatggatgtagcctgatgaaagtagccgaaagtatcagagtccacaaaggagaggcccttgtggaagttcctgtagaaacagagccggtcccatcctccgatacctcttccatggtgcccgataaaacagacatatcaacattcaataccttttttatatgataatgaacgaacagattaaaaatttatgctcgcgtttacgcttgtatgcccttccgaggttattggaatccgaagcccatattgcacgggaacagagcaagacctatgttgaatttttacatgatttgcttgctagagaagttctggaaagggatagcaaagacttacaacggcgactaaaagcagcttctctgccgtcaagacacgacctagaccttttcgaccataattactcacaaggcataaccgcaccaagactgcgtgaattaaggcatctcggatggcttgaacagaattacaatctgatactcatgggaccatccggtaccgggaaaacatttattgcggcaggacttgtctatgaagcggtatcgcaaggttacaaggcatacatggttacgatggaagatgttataaacaccattaaaatgaaaacactgatgccatctgccatgactgcctacaaccgtttgttgaaagctgacctcgtcgccattgatgatataatgctgttccctgtgaaaaaagaagatgcagcgggtttctttaacctaatcaacactctccatgagaaagcgtccttgataatcacaacaaacaaggctccgactgaatgggcaaaaactctggatgatgaagtgcttgcctctgctatacttgatcggcttttgtatcattgtgaagtcattaaactctctggacaaagctacagaatgggaaatagaaaatccatctttgacaatgataaagaataaggataatcccctttaaatagggtttggctatagtatttaattgatattattaacattttgtctcgacttatttgtgtcgattttacttttccgaaaattgtcgatttaaaatttgcttattacaggtgatttcatccgcatccaagagggcggcgatttcggggataagggcggtgaatttcagccgtgtgcggatgtagttctcgttctttccgaagagttgcgccaaggtctgcacggtgtggcgtccgctctcgataagccgctgataggctgcggcttcctccacgggtgtcacgtccttgcgctgcaagttctcagtaatcgccatttcctcggcttcctcgtccgacaactcggaaacgattgcgggaatttcgtccctgcccgcaatgacggacgcacggtaacggcgttccccgaaaacaatcccgtaacggtctgtcccgtcaacggggcgcacggtgatgggctgcaacacaccctgccgcttgatgctctcggcaagctcgtaaaggctcgtttcatcgaaacgcttgcgtgggttgaaaccgctcggctgaatgtttgccaatgctaccatcgtgatgtttctctctgctgctgattgatttgcttttgtcttcataatccgtttgtttttaagttgattgtttattcttgttctttttgataattttttccggtcgggaaatcggtttctttgctatctttctttccccgctccggctcacgaaagaaagtagcgggcggaaagtccgcccttgcggcttacctgcggttatagcacacgttcgcgaacttctttttttgctctaccgcccgtttgagggtgtagaacgtgccgcccacggctaccgaatcgtaatagaccatcagaaaagcggagttttccaaaaggtagtcgttacggcgtaggaaacagccctcggtatatccgtcctgcaaggttaccacttcatcggcttgcgccaaaatggtgtcataacgccgcttgtcggcctgggtgtaccgctcggcttgtcccttgaaggggacaacgcatttcaaatggatatgcgggtattcctttttgaggttcaagacttcctctgctgcgataaggtcgaagccctcgcacattcccgacaaaaaggtatggtagccttttttgatacaataactctcgatggctacaaatgtatcgaacgccacctctttaaagagtttctcacggtctgccgtgaacttggctatacggttggtgcggtgtcccgaaaaggctaccgtcttttctttcgtaacgggtgttccgttttctgtcaatgtccttgtttccatattggtatttttttatcggttattacttgccttcttcctgccacaaaccacgctctttgtcaaaatcaatgtcgtagtagtaggctgtctttgttttgggcttcctgcgcccgcccaaaacttgggtttccaaaaccttgtacccttttcgggtggctgccacgaccacgcaagtgaggtacggcagatacttgtgtttaaacttctttccttccatgattcagatgattaaaagaatgattatcaagatgaacatgaagccgaaaaacaaccgccacgcaagggcgaaaacaagccgtgccacgaagtctaacagaagcaaagtagcgaatagggcaaaaaactgccctgcggtggtggtgaggaagtacaccgccgaagcccaaaggattaggcggtaaaccagtctgtaaatgaatgtcgttttcatgttctcgggtattgtcgggcggattcctccgcccgtggttgtttaatagtttcctttcggaatatagcggttgtcggctatcagccggaacgtgtcgtaatcagccgttccccgataacttagggacagttcaaaagagaggtgtccttcctctatgtagaaagtgaagcgcaagccgttgcgggttatcgtcccttttgaacggtttttcccttcccatcttacgggttcattctcgatacttttcaagaaatcggcgacctttttcgagttctccgcattttcttgctccacctgcctgtatatctgcgtgcagtaatttatccaatcgtttattttcttggcggtgaacacgccgatattacacggcttttcgtattggttgcccgccctttcgatgtcgtagcggttgacatattcaaaatgctccatgtcggctgctatcctgtatttgttctctttgtatatcttgcacacatggaaacggatgccgttatacgtgaactctatgcgtacgccgtaaaatgcgggatattcaccgcttgccacgtggtagccgtattccgcttggggtatgtacttccttatctcctgcatgagtggagacagctcttttttcgcccgttccgctctttcggtaaacatcgcatttacgttaaagccgttaaattccttttctgataatgttttcatcgtcttatgtctttagtggggcggactgctccgcccgttggttgatactcttgttcctttgttgttccgcttaggctgctgcgggttcgtttaccggttcggttaccttgtcggcaatcatcttcgccgccttgttcacgtcccccaatatctccaccaaaaaggcgggttcttctttcagcttggtgagccagtgtttcagataggcggcgttgttctcctgcggtgcggttgcgtagccgaagaacgcaccgcaaagggctgcggtaagttcggcgacaagttcctcacgggcatagagcgcatccccgaagaagctgccgaacgtgcggttcagccgctgggggcttcccgtgctgtgcgccatctcgtgcaggagcgtgccgtaaaactccgctccctgcgggaactgctcacgctgcgggcaaacgatatggtcggaagagggcgaatagtaggcactgtccgaatactgcaccttgatggggcaataccagttttgcagatagacaagctcgtccaacgcctcgtaaatcatcccgtccgaataatcttcgggctgatcccctttcttcatgcgttcgtagcgttcggggtatttccctgcaaaatcggtctggtcgatgttgaagacattgtaatacttcatctgcgggatgaccttgtaactttcctgctcggttgcgggcagcttgcggtattcctcgtacttgattgtttttttcgtctccttgtgtaccacgaacttaaaccaataataaacgggaaacgagcgtgcgcccttgctgacgctcaagtcctcctctttcgcttggttgaacgtgaggaacacgggcaaagtgaatttcatgaactcggtgtagaacaataacatcaagacattgccgccgttatagagcgtccctctgatgttgcggggcaaaccttgttcaaggctcgcaatccacggtttttgccaatccgttttcaggcactcgattttctttatcaataactcggtgaacatcggtgcaattttttcgatggtgctgttcgttgttgccataactcacaaattttaatcgttattactctgttttcatcgcttgtcgccccaaccatttttttcccttggctgattgggaagaacattgacaatcattgatagcggaaaaggtgaatggcaaccatctgaaaaaatggtaaatactacccgcagggtggagatttggcattttttgcggatttgctttcacctccgcctaccttcgtcaatgtttttccaatcagcttagggaaaaaatgccctgtcagtcattcctgtcaatggtcggttacttgccgggtgcgggaaaaagaagccttccggagagccgggaacgcccgtttcccaaggcaaggacatacgtgcgggagaagtatatgggaggacggtcagctttcggcttccggacaaacacgggggaactctttcggacgggacgatgtccggcctcggccatgcagcctgccggagtggtcggcagcggacgccgggacgagacagctcgtgcgccaaagtttaagcacaagacagtgaaagccctttcacccacgttagggattgcaggggaaagcccgatccgaaggggaacgctccgacaatcatccggaaacacgaattgaccgtaataacttatttcttaaaagttatcagaattatggctcttttccgtaattttgaaacctctaatgaacatggctatgaatagaaacatactcacctttttaaatgaatatgcggaaatacccgatccgcaatatgccatcatgctgcgaggtgcctggggatgcggcaaaacgttttttatccgccaatggataaagcaactgaaaaacgataaagatgcggaaaagttaaaatggcggcccatatatgtgtctttatatggtttgaccactacccagcaaatcacagaacaaatcaataaggaaatatccccgtggctgtacagcaagggaatgaaactggccaagaatatattaaaagccgcctcgaaaatcgctttgaaatatgacatcgacggtgacggaaaggatgaagggagtgtaacctgtgacttggactccattttgttgttgaaagaagaaaattccgaaataaaaggaaacaagattctgatttttgacgaccttgaaagatgtgatgtaaaactggaaaccttgttgggatacatcaattacttttcggaacattgtaaatgcaaggtcatcatcattggcgatgagaataagatttccgaaaaagaggacgataagtgcaagttgaaattcaaggatttcaaggaaaagactatcgggcgcacttttgagatcaaagtgaatataggggagacactcgatttcttcattggcgagatatccaccaacaacaggaacctcttgtctgagaacaaagagcttatcatcaagatattccatgcctctaaattcgataatttaagagtcctgcggcaatgtctgaacgattaccacaggatagtcatggctttgccggagcattatcataaatctcccaagtacaaacttgtcataacatcgttgttggcaaattttgtcgccgtttactgcgagtataagggtgggaatacccggatcggaagcctgttcaatagcctgtatgacatgttcccggataaagagaaagatgaggagcgtgaaaaaatcctctccaaataccgttttatagagataggtaaacagttggatatttttgatagattcatcgttaatgaaattgtctgctatctggaaagcgggtattttgacacgacctacctgcaacaatattttgcagccgaagacgcaagtttgaacagttgggattacctgtacgactattggagactggataacggggaatacgagaaacactacggggaaacggtacgatattactttgcggatgaaagcgttgatctaaaagaattgtttgtcattatatctgtactatcggttttatatagcgacaaccttgttcacgtatccgaggaagacatcatagcccaaggcaagcactccatagacaggctgatggaaggtatcagcgacatggagggtttgttgaattgtaactcaaaggtacatgcgggtacaagaaggaatcattctaatattggttcagatcgatttttgaatggacttgttgcgtattttcaaaaactattcgggcaaagattgaagaaatgccctaataaagtgtctgtcatgctggaaaatctgacggatgaaacttgcgaacgcctgaatccggcattgaatgatgtagtcccggtcaaacagcgtctttatagggatacttcaatattccaagaggctgatgcggataaggtttcaaaaagtattttgggattgtccaacgaatcacgtaacacctttctgcattttttacagttccgttataaatatacctcttggggcagtgaaatagaacacttgagcaaatattgtcaatcagatttgccacaactaaaattaatcaatgaaagactaaaggcagaagcggcaaacaggagattgatagaaaagtattccattgagaagatcacgaacctgatagatgaaattaccgcaaaagtaaaataactattccagtccgttttcgaaagagatggctttgacaaggggcaagccggtgacgaaatttgccccgtgccccatcaacttgcatcgtggctggatgagggtgaagtcggtgcgtagtacacattttcccttgaaccatccggaattggtgctatggattccgttctcgtgcgtacccttgaactgggtacgtttatgtaggacttttccccgcctttcatcgtttggggtacgacaaggctacgaacgtgaagcaaaacggtgacaagctatacggttttgatacatagttttatatgaatccatatatttgcagggaagtataatgaaaaatgtatcagaacgatggaaatagtaagtattgaaaagaagacctttgaggagatgaaggagcggttcggctgcttctcacggcacgtgaaggaactttgcgcccgttaccgcccgcccgggaaaatgaactggatggacggggcggacgtgtgcgagaaactggggatcagtaaacggacgttgcagacctaccgtgaccggggactgctgccgtacagccagatcaaccataagatttactaccggatggaggacgtggaggcattcgtggaatccatgagccgggaaataatggaggacgagtgacatggaagtgataacaaaagacacggaagaggtacgtgcgtacttcgaggctctggaagagggtatgaggtatattgatacggtgacggcgcatttccgtccggcgatgaacggcgaggtctatttcacgggtgaggatgtgtgcagaatgttacatatcacgtcaaggacgttgcagggctaccgcacacaacggttgatcccgtacatatcgctgccaggcaagacgctttaccgccagtcggatctgctgcgtatgctggaagaaaattacgtggacatgagacaaaagtgcaaacgggggaaaagtccaacataaacgcacggggatatacatcggaaaatgcagcaaaggcaggagcactgtatcggggttcctgcctttgccgtgtttcgcatggagaaaggtgtcaagccgtttcccggagggaccggtgcacctgtttcctgccttgcttcctgtcccttttctccagtacgctccgctgcatggcggcgaggttgccggagattgcccggaaatctgaacttaccatcttgttggttacttcagcgtagatctgagtggtgctgatgtgcttgtgaccgagtatcttggagagcgcctctatcgtgccgccgttgcagagatagacggtcgtggcgaaggtgtgcctgctcaggtggaatccgatctccttgctgatgccgcaggctttggcaatctgtttgaggtgcttgttgcatgtaccgttagagggcatgggaaatacgaaatcgcctccggcaagttccttgtacctttctatcagttccttggctatttccataaggggaacgttgctcgacacacgggtcttggtgcgtcgggttatgatccactcctcgccgtcgaagtccatgcgctggatcttgtcatgggtgagtgtctttatatcaatgtagctaagtccggtgaagcaacaaaatgtcaggtaatcccttttaggaagaacaccgcatccaaaacataacccgttgagatatagcgatatttcattattctacacattgactgaataacccaaaaaagaaatatattgcgacggttccgctaccaagtcattacctgcttccgagcgggtaagctggtgaaaaccatggattttctctccataccacagtgtagtattagtgaactccattttcccttgcaagggaaaaccaccaatcgggttctttttcaccgttttgccagtcttttcatatcgggaatccttgtaacaatttataatattgcaatttaaacaaggaaaggaatgaagacagaattcaaggtgctgctctatcttaaacggaacgggcagggaaaggacgggctctgcccgctgatgggaaggatcatgataaaagctacgggcaattcgaccacacagttcgggtgcaaaataagagtggacccgaaactgtggaacgccacctcgcaacggtgtacgggaaaaagccggatggccattgccaccaacagggcaatagacaagatgatgctcctgctgcaaaggagatacagcgaactggcggaaatcagcgatgacatcaccgccacacagatacgtgacgctttccagggtatggcggagaaacaggtgactctcttgggactgttccgtgagcacaatgaggaatacgccttgcgtgtcggggtgaaccgtgccgctaacaccctttacctgtactggcatacattccacttcgtggaggagttcatcaaggtgagatataaggtatcggatatccctttcaaggcactggacgaatcgttcgtcgaggctttcgagttgtatcttcgcatcgacagaaagtttcaggcaggaacctccatagggcacatccagaggctaaagcatatcgcccgaatcgccgtgagccgagccatcgtgcctttcagcccgttcaaggacttctcccccatgaagccaaagcagaaacagaggtttcttaccagagaagaactggacaggttgatgggcaccacttttgatacacccaaccgtaacttcaccagagacatgttcttattttccgtcttcaccggcatctgttactgtgacatgcgcaacctgacggaaaagaatgtggtgagggaccacgaggggaacttatggatagaaaccagaaggcagaaaacgggaaccccggaaaacgtacgcctactggacatcgccatagaaatcatgaagaaatacaggggggtggcaccagacgggaagctgtttcccatgctgacaaaggaaagcatgaacattcacctaaaaaagatggccgcacaatgcggcatcgatcgtaacttgtccttccacatggcccgccacagtttcgcttcccagatctgtctctcacagggcgtacccatcgagactgtcagcaaagctatggggcacaggaatatcagcaccacgcagcgctatgctaaagtgaccgacgagaaggtggaccgggatgtgacgatactagagcatgagatcaccggcaaatacacactgtccggcattgaccagcctccatccactattctgaaggacatgagtttaagagagatgcggagaagagaaagaaaagaaatattaaacccaatggaaggagtgtaagaatgagaagcacattcaaactattgttttatatcaacagacagaaaatcaaaaaaaacggaaaatgccccgtcatgggacgtatcacccttgacgggaaagtaagccagtattccaccggagaggacgtgcagccgaaattttgggatgccaataagggccgtgccgtcatacacggacagaatccggaaacctccatagagttgagagagctgaatcggaaactggaggaactggaggagaaggcacgaaccgcctataagaagagcgtggactcagccgggtacgtctcggctgagatcataaagaacgcggttacggggaaggctcagcccaaagaacatcttctggccctttttgacgagcataacgaggagtacgccaagcgtgtggggatcgaccgcacacaccatacctatatccgatatttgaccacacgaaaacatctgtacaacttcctgcaatacaaatatggagtggaagacgtgacacttcgctcgatagacatgcagttcatcgaaaacttccatttctatctttccacaatattgaagttgaaaaccatatcactgaacgactacctgatcctgctgtgcaagattgtccggctcgcagtcaaacgcaggatactgtcacgctatccgtttaccggttacaagcttgagatccccccgacacttcaccgacacctgacaggtgagcagcttgccaaagtgatggcaatcgatcttcccacctaccggctgtgccacaccagggatctctttgtcttctcgaccttcaccggactgggaagggccgaaatggccgaattgtccgaaagacatatcgtcacggctccagacggctccaaatggatacacatcaaccgtcagaagacaaaggtggaatgccgtatcaaactgcttgacatcccattaaaaatcatggaaaaatataaaggcgagggagagaatgggagactgttccgggttccggccacttgcagcctgtccagaagcctgaaaatcatcggggaaatgtgcgggcttgagtgccacttgacctattacatgagccgacacacctatgcgactgaaatctgcctttccaacggcgtgccaattgagaccatcagtaaaatgatggggcattccagcatacgtactacacagatttatgcggaaataaccaaccaaaaggtacgcagggatttcggaaaactttcggaagaaaccaaaggcatgtattccctgccggacgacaacatgccgtccagggtctatcaatgcggacggtacagcggatggaaaaaggaatacgaccaggaaaaaaacgaaaaggtaccgtaatgtatggtcgcaacaagataaaacaagggacagaaaccgtcttcacagatttctgtcccattcattttgacctcattccagacttcccttacaatggcgatcgggctttcctgtatccatcccgcaacattttctctatgtcactttctctgtacagaaccttaccaccgagctggatgtaaggcagtctgccttcgttccgatattcctgcaaggttctgcggctgattttcaacctgccggagagttcacggtcggtaagataatgttccccgtccaatacgggacggtggcttcgggacaggctgccaagcctgtctgtcatatgatcaagtttccggaaaagggcaaggattctctcatgctttccggtcagcagcccgttcatatctggcctccctttctcttttgaatggcggaaagtatcttttgtatatcctccggcctataatagaccttgtggctgatccggctgtatgccagcgtgccgttctcacggagggtctgcaaagtacggggggaggcgtccagcagaaggcagacctcttgggtatccaaccattcccccattctcttctcacggagcttctcacagagttcatctgtaatccgggctgcattttccagatactccagcatactttcaaagactgtcgcttcaatagtgacgatttccataagcgtattcaattggttcgaaacaaatatagcggaacaacgatcttttctccaaacgcctgtcgtcagatgtcatcagatttcatcagatggcaggaacaagataaaaccccaagatacagtgcatgcggaaaggcaaagaagccgagatgcaggcataaagattatgcagagcagagagagcagaagtccctgtcttctcatggagcggaatcttttctcacaagatattgtcggacccatgtatttcgctattccacctgcttttatggagatataaaggaggcctgcctttttatcaatgacacggttatgcgtcgcgtcggtcgcagtgagtccctataatccttcccgaaatcaaaatcattgtccgggcgtttgtttccatgggtattttctgcgacttgtcgtaaggaaaatacccatggaaagcgaagccgcaacgcccgagacaataagattttgatttacttttgattataggaactcactgtgccaatacttttcaagactgacttgtgattataaaccgaagtatatattggttgaatacagcctatagcccaccacgccaacgtgggatcgggagcttcaacgaggcattcaaatttcagatgcgagggcataggaaccgaacgttcttaacaaattcatgaaccagctaaaattggtcttcgtccacgcttatattaaagttgtaaattatctgattattaaccaacatacaatgtacgactaataaataagcaacaaacttcatataccgtttacattttgtcctcatctttaccggatcgctttttccctagagttgttctattgcaggaatatgtgagtaataaaagcagggaggctgggatgacagcccgatcttttattaccacaaagcaagattcttaaaccgcatctatttactattctatctttttgtttaattttatattcaatttaaatttatttcatttacttttgtcgcataaattatggtgtgacttgattatgtccatagttaagtcggtaaaagggaatccagtgtaagtctggaactgtatccgtagctgtaaatcaataaaaccgggcgttctacgaaccactgaccataaatattaggaaaggttgggaaggtgattgccgagtaaagggagatgagtcagaaaacctgccataattgaattatgcgtcacctcggataaggtgatggtaatatcttattacgatgaatataatgttttttaagaccataaggagaaaaaatcttatggttatgatgctagggatatgccctctatgggtgtatgcccaaagtagattggattccatccaacatttggatgaaataaccgttgtggctaaaagtttcagggaagtcataccttctcaaaaattgtcaggcaaagaacttcaaaaattgaacagtcacagtgtcgcagatgcccttcgttatttttccggggtacaattgaaagactatggaggtgtaggcggtataaaaacagtgaatatccgtagcatgggaacgaatcatatgggggtattttacgatggaatagaattgagcaacgctcagaacgggcaggtcgatttgggcatgtattcgttggacaatatcgaggaaatttctctgtataacggacagaaaagcgagatattccagtccgccaaggattttggtgcggcagggacgctctatcttaggtcacgcagacctaaatttgaggacggaaaaaacacgaatttaagggcaaccatgaaagccggatcttttgatgtgatcaatccttcggctctttttgaatataaaatatccgagaatgtagccgcctcgttcagtgcagaatggctgaatgccagcggaaaatacaagttccgttaccgtcgtgtcaatccggccggagagatcgcatacgatacgaccgccgtgcgggaaaacggggatatcaacgcaacccgcttggaagcgggattgtatggaacaatcgaaagaggaacctggaacgcaaaagtttataattataattctgaacgtggtatccccggcgctattgtcaataacgtgtggcgtcgcggagaacgggtctgggataccaattccttttttcagggctcttttgtaaaagaggtgaacgatcaattcaaaacacaggttaacgcaaaatacgctttttatcgtacacactatgtaaataatgacgataaactgatcgaggtggataatctttataaacaacgtgaggtttatgtttctacagccaatatgtacacgattttcccattctgggacgtttccatgtcatacgattttcaatggaatgagatgaaagcggatatgtacggttttgtattccccacccgttttaccaacctgctgtcgatcgcaacggctcttcgcctgggaaaagtaaagttgcagggaagcggtttggcgacgtttgtgaacgaccgggtcaaagaagggccagcccccaaagcccggcaaatacttactcctgctgtttttctttcatataagccatttgataaacatgattttagtctacgagcattctataaaaaaacattcaggatgcccacttttaatgacctgtattatgctgatatgggaaactccaagctggatcccgaatatgtcacgcaatataatctaggaaccgtataccaaaaacagtgggggaataaattatttcgccattttaagatacaagcggacggctattataattatgtgaaggacaagataatcgcttatccgaagggacaacaattccgttggacgatgttaaatttggggaaagtgaaaatacgaggtgttgatataagtacagaaacgatgattaatccttggaaagacttgttcattaccatgaaagtacaatacacctatcaaaaggcgcaagattataccgatccttccgataattattataaagaccagatcccttatataccctggcatagcggatctgctatcgcccaagcttcttacaaaggctgggacttgaattacagctttatttatgtgggggaacgctataaccaacaggaaaatatcaaatacaactatacacaaccttggtataccagtgatatttccttgtctaaagaattcaaaatgaaatttggttcactgaaagcatctttggaggtcaacaacttgttgagtcaagattatgatgttattttgaattatcctatgcccaagcgaaattatcgggcgtctttaacggtcgaattataataccgatgagtatgaagctgttattttatataagcatctttatcctttccttttcttcttgtcggaagattgaaattgtcgtcccttcggaatacgagttgattggggatggcatacaaccggatgctgatcctgtcggaatgtatttggtgaatgaggggaatatgggcagcaataaatgcacgctcgattatttggattttgttaacggatattatatacggaatctttattccgagaggaacccggatgtcgtaaaggaattgggagatgtaggtaatgatatccaaatttatggaagtaaattatatgtagtagtaaactgttcccataaagtggaggttctggatacaaaaaccggagttcggatatcccaagtggatatcccaaattgccggtacatccgtttttatcggggaaaagcttatgtaacctcttatgtaggccccgttcaaattgatccggatgcgccacagggggctgtttatcgggtagatacggcttcattgaaggtagaggcgaaagtgacggtcggttatcaaccggatgagttgactgttttgggagaatatttgtatgtagccaattccggaggatatcgtgcccccgattatgacaataccgtttctgtaattgagttggagcgtttcaagcaggtgcagaaaataccggtcggtatcaatcttcatcgtatcagagcagacaaatatggtaagttatgggtaacatccagaggagattacaacacaatccattccaatttgtatgtattggaaaaacgcccgggttatacggagatggtcgtaaccgacacgttaaatattccttgttccaatttatggattgacgatgattgtctatattattacagtacggaatggaataataatactcaaagtaacacgattggttatggagtgatagatatccgcacaaaaaaagtaatcagggatagctttatatccgacggaacagagaaagacatcaagataccttatggaattgccgtccatccagtgacgaaagatatttatgtcaccgatgcgaagaactatgtttccagtggaacactgtattgctatgatcaagacggatttcaaaaatggggtgtccgcacaggggatataccggcccatatggtctttgtaaacaaggaggaataaacatgagtagattgtggagagagagcgtcttttttttgtttttgtctgtattcggcttttccggttgtgataaagacatacagatggtcagtttgggaattgacgatatttattatttgcctcgtatgaaggcttacgcattacatcctgcctttaccggagaggaataccggtggaccttgaggtcggatggacgggatagccttttgtcggagaagagagattatatatttcttgccaaggataccggaacatacgatcttacttttgagatcattgatcctacaactccttataaacatgatttccgtttcgtggttatgcacgaggagattgaatatagtccctatatctcgaaagtctatgaataccgtcccgcgccaggccaatttgtcaatctcatgcctgaatatcaggaaggtgaaacggaggaggatatacgaaaaaaagtggaggaaaatatttccggcacaaatgacgagatgatctcgctgggtagttacgggggatatgtcatattcggttttgatcatacggtgatcaatgtacaaggacaaaaagactttcgcgttttagggaatgcgttctattctgatttaccggagtttgaggataaaaaaggaggaagctgtgaacctgggattgtagaggtctcttttgatacgaatcagaatggtttaccggacgatgaatggtacgagttggcgggtagtgaatattataagccggaaacggtcaaggaatattccatcacttaccggaaacctgatcccgataagattccggaaccggacatgagccagcagatatcggatttaacttatatttcctggagggataatcaaggggagtccggttatgtatctcaggtaatttatcatacacaaccttattatccggcatggttatcagaagaggatataacctttaccggaaccctcttgaaagcgaacgccatagatgaaagcggagctgggagatattatgtcctgtattcttacccttgggggtacgtcgacaaccatccgaatgaagaaaaagatttgaacgattttgatattagctgggctgtcgataaaaaagggaatccggttcatcttgacggggtggattttattaaggtatattccggaatcaaccagttttgtggatggataggagaaacatccaccgaagttttacgggcacaggatcttcacatagaaataaaggaggttgtacctcctgatccggtgagcctgaaacaacaatacgataacgcaattctcaaaataaaaggattatgaacaagaaaattttaaccacagctatttctttgctgtttgtctcgtctgtcggtgctcaacggggtaatactcgatggacggcagagggtatcagcctgaaccgaccggttcctgagttacggagcgcctcggatggagacgtggattattcggatggtgttttcatcgtgaatgaggactggtacggccatcaaaacagcaccgtcaatttcctgaccaatcaaggggaatggatttatagggcttttcaaaaagaaaatcccgggcgtgaattgggatgtacgacccagttcggtacgatttatggcaaccgcttttattttgtgtcaaaacaggaacgggatcccggagcaaaaataaccggtagtcgttttgccgtatgcgatgcctcgaccatggaggttatcaaggaattcccatacatagcgacaacgacgaaaacagacaaaaacggtaaggaaaccctgatctccatcgccgatgggcgttcttatttacctgtagatgaacataaaggctatataggtacgagtaatgggatttatgtattcgacaatgataatttgaccattggggggcaaatcaaaggtacgggtaatccaaatgacgagggatatggacaactgtattatgcccaaatagggaccatggtacgtgccaatgattatatttttgccatacaccagcaatacgggcttttggtgattgatccgaaaacggatacactggttagaacaatcaaggctccacttgagaaagatgaatcaggaaaagaagaacaacgaggttttggctccattgttttgtcaaaagacgggaatttgtggattagtgtagccaaggacgtacaaggattgggggccgccatgaattacatgctcaagttaagcccttatacgttcgaaatggaacgtgtttatttcccggaaggtattgaatatataccaaattcatggtatgcctggacggctgacggtttttgtgccagtacgaaagagaacaagatttactggaacggttatcctcctacacaggggagctggtttacggggtatcgtatttattgctatgatattgataaaaaacaattttccatggtatatgacgtgacaaaaatgccaggtaattggcgattatatggtaccggttttcgtattcatccagtaacggatgatctttattgttttttgtaccatgagtttcaagacccgacacatgagttggccaggatcagttctaccggtgaattgagaaacgaatactcgatgatacagaattactggttcccggcgatccctgtatttccggataatgaagctccggtaatctccagcgcaatgccggaagatatcgtattaccgggtatcggggaagaatacaaattgtacttaggggataaggtttgtgataaagacaatatgtccgtatctatcgtgaagtccgtcataacctgtgacaaccccctatcggctttcgtcaggaatgattcgcttgttttgaaagcgacagatcctgtgaaagaaggtaacgtgacacttcaattcaactcaaacgggaaattggtcactcatgacttggccgtatcgacaggtggagacgtgacctccaatgaaaatatggaaccaacggaagacatacgggttttcttatcagggaataatctttcggttgtcggagaaaatatacagaagatcaagatttattcccaaacaggcgcgaaagttttggaacggatgctggcctcaggcgatgcggttccggtcggacatctgacttcgggcgtatatataatttgtgtagagcaatcgaacgacaggataacaaggaagattttactgccataatatgaataaaaaaagtcggtctccttttctcatctaggattccggctttttaagtgtaaaaggttgctcaaaatagtaaagatttaatatttttgtacttgtattggtttatacataccgttcggggtgtataattaaaagggaatcaggtgtaaatcctgaacagtcccgctgctgtaagctcaaatacacattttaggcatcactcattgccactgttttttgaaacgggaaggtcgacctaaaattggagcaagtcagaagacctgccaatacattttatgaaagcaatagaggctttcttcggattcattccaccggggtttggaataggattcgtcttgggatatatagcattatttcgtggacaattaattgcacgggataatacagaggtcgcatgcgacctctgtaattagatacatgtatctaatttttttaattgatatacatatgggtagatttttatctttaatgcttgctatgtgcgccttgttttttgaaggatttgcgcaaaggcaggtgcaaggtatcgcacgtccggatttgaatacgggcaagacgaactttcgatcaggagaattacgttcagacacgcgattttcatttgaggacattcagttttgggtaggctccggttccaaccgggccgcgttggttatcgaatggcatgacggaactcaacctgatgccatggtctgggggtataaatgggatggagaggcttccggccatgatatgatcgttgcgatcgctaaagccgatccgaggcttgttttacttacccaatatacgggaccaatgggatatacgatagacggtatcggatattcggaaagcacaatgaatatccaatacaacttgcaagaagccaaagattatccccgtaacgctttcgattttgatttaccaatagaaaacaccttgttaggacagacttctgttccggaacacccggcagaagatgtggccgaggccattcgagaaggattacaaaccggagttatctatcatccgttaaatgcggaagtttacggttatccttcttatgattatgattcctggacttgcgataacgcgactcattgggaagccggttggtatgaaggctattggagttattttgtccgggaaggtcaagccagtactttttcttactctggtctgggtgcgaccagccggaaattggaggatggctcttgggatgcctggagctggaacggggatatgagtacgatggaaggaaccgctcccggtgatcattttatcgcggcgaccccgattgacgatccaacccctgatccggatgtaccggtaagttatgttaccttatctcaatctgaactttccttgtctgtcggttcttacaagcgtttggagtataccgtatttccgacaaatgcgaccaatcagactgtttcatggagcagttccgatccacgtgtcgccacagtcgaaaatggaatggttcatgccattgctgcgggaatggcacggattaccgtaaaaacacaagacggtggttacacggctgaatgcgtcataaccgtcaacggcaatttggaaggcgaagcctcttttgatcctcaaaaaggaatcctgtcctttcaaaaagtggcaaatgcgacctcttacgaaatccgtcaatatcggttggtttcaagcgaaaaggtattggagaaaacgtatgtattggacgaaaacggagatatgttcagcgagttccctaacctgagatcctcttcgcaggatattgattttcaattaagcggtttagaaaccggtgtggaatatcttatcgaaatacaagtcatgaacggtttggatatcgttggctcgtttgaggtggataatgtctcgattcctacaggcatagagaatgttaccttcaaccgtccgctagctcttttcaaagatggaggatgggtattccgaaatttgcagggatatgccgttacagtagcggacttgtcgggccatatcatcgcaagatatcatgtgaactcaactgcggaatatcattacctggagttgtctcaaggtatctacatcgtatttggagataataaagacaaaaaagtatcattcaaaataattataaaataaatgaaaagaaagaatctgattacgctacttgcgttttttccattattcagcgtttggggacaatcctcgctgaatccggtggaaaaagagaaattgaaattgcccgaactgcctcaaacgatgttaagggcaaccgctcaggcgaatgaacaagttgattacacgaaaggaacctttattgtcaatgaggattggttcggccatcagaacagtaccgtcaatttcctgtcagatgacggaaagtggacacttcgggctttccagaaagaaaaccccggtcacgagttgggatgtaccagccaattcggtacgatttacggagataagttctatatcgtttccaaacaggagaaagatccgggtgcgaccgttatcggaagccgtctggcggttatcgatgcgaaaacgatgaaggtgctgaaagaatttacgagaatcggagattccgacgggcgttctttccttggcgtggatgaacataccgggtatataggaaccagcaacggtatttttctgtatgatattgacaagatggaaatcggggagagaattaccgggactgagaatacttccggcagtttgtacagtgctcaaatcggtacgatgatccgggttggagaccgggtttttgctgtccaccagaaagacggattgttggttatcgatgccaagacccatacgctggaaaccaccatccttaaacctgaagagcatgaagggcacggattgggttcgatcgtcctctccaaagacggtacgatctgggcaagtccaactgtggaactgaccggcacgggggcttctttaccgttaatatggaaagtggacccgacgacattgacggtgcaacaggttgatataccgacaaccagtggaattgaggaaattccaaactcctggtacgcatggacggctgatggtttttgtgccagcacgaaggaaaacaagatttattggaaaggtcagggaacaggtagctggtttacaggttacaagatattctgctacgatatcgataagaacgaattttataaagtatttgacttcggaaaggtggaaggtgactggcgattgtatggaactggtttccgtatcgatcctgtatcggacgatatgtattgcttctggtatcatgaattcctggatccggaacatgaattggctgtggtggagaccgatggacggggtgaaaagaacgggacgatcaaaggtcgttatccgtatgacattaccaattactggtttcccgctttaccggtattccctgataacgaggctcccgtgattcagggcgaagcgccgaaagaggtagtcctgagcgcggagcgtacacaggtcagcatccctttggaagagatcgtgaaagacgctgataatatgactgcggcaattactttgactactaccatgagtgaggcgcatcagaagttgataacggttgccgtgcaaaattgccagctggtaatccagccggtagaggcttccgtcactacagcgacaacaattccggttcatttgaaattcaactcgaacggtaagacggtggaaacggatctgaccgtgaaactggaagaaggtaccggagcaccgtttgtcatcagcgaatcggaagtagctgtcgagaaaggcaaaacagttaccttgacggtgaaaggcatggaaggtgagacggctacttggaagtcggaagacggtgcgattgcaaccgtttcagaagacggcatggttgctggcaaggcgaccggaaccacaacgattactgcctccagcaaagatcgtgatgtgaaagcgacgtgtaaagttacggtgaagagggaaagcttgattttggatatggcgagtgttgagcttttcgaaggacaaagccaaactgtaatggtaaaagggggatggttaaataataaggaaacattaaaatgggaatcttccgatacatccatcttggaaataactcgacaaaatccggggcaagtacaatttaaagccttaaaaaccggctcagcgaagatcatcgccaaaatatcttccaaggaggaagagtctatcgtcttgacaacaacggaatgttccgtgcttgtgaaagagttgattccggtagagaagattgaattaactacatccgaaggagaacaacccgaagaagaaacattaaaattcaatatcaacgggaagaagattttgaaagctaaagttttcccagagaatgcaagtattaaagatgtagaatggataagttcaaatcaagatgcatttacgattgaaaatgggattgtaaccgctatcggtgatggagtggctgaaataactgtccgctctatacaagggcaaaatgaagtaacatcgaatccgatcaaagtaacttgcgaatatcagttggaacgcattgttttcagtctacctgtatatgggtattcgaaaagcatgatgaatgatatgggggaaataacgcctgaagttaaatgttaccctgcgactcctaaaataaaaacaatgaacatagagtggaattttcaggttcccagcgactggactaattccagtttgaccaatcccaaagaggaagcgtcctctgatgattcttcggacaaaaatggaatacgttataaaataacacagtatcctgaaaactgggagacctctgagccttatactttttatgaaggagaagtcccgttggaatgtaccgtcacgtatgcgggaaagaaatataccgcagagtgtatcattaatttccaagaaaaggatttggaaagctcctttgagttggaaaatgaagataaaaagacactgttgaaatcgggtgagaccttgcagttgaaatggaaattggacggagaaggaatgtcctcaaaattaaaatcggacgaagtaagtgtaaaattcatctcctctgatgagaatatagcttctgtaaataaagatggtttgattacagcaaaagggaatggtatagctacgattaccgcttatgtatcagatggtagttattcagaggaacgtcagattttagttggagatacttgggccacagacgtcgtatgtaaagaagatacggtacgggttactttgggtgaggctgtacaattagctgccacggtgaatccgaaaaatgcgacataccctacggtggaatggagtaaacctacgaccgattggactacgaatagtggtacaacggtgggtgccgctgacataacagacgatggtatttttagtacgatgtacaggtctgacatggcagcaaccgtgaataatataggtaaatatgacgtgaaggtttcctcttttgacggccaagcatccggccaatgtgtagtttatgtattgggattagaacctttgcaagacttgacattgaccagtaaaggggtggatgatgaaatctcgatagacgttaaagacgacatagaagaaggtattttatatacccagttcttcgatgtcgggtttgtaccttcaaacgccactttagcaaaagccttgacaacacgttttactatcacctcacaagataaggaaattcttgaaataagcactaaaaagttaggagatacgcatgaggaaggttttaccttgaaaccaaaaaagcagggtactactcaaattattgttagtgccaaggaaaatgatgtaaaagcggtgaaaacaatccgtgtaacagatagcagttatggcatcttaggtgtaaccctcgacgcctcggtgatgacagtaaaagccggagagcccctgaccatcgggtatcaggtggaaaccaagcaggatggcgtggtgtatgataagaccgtctattgggaaagctcggatccttcggtggctacggtcgatcgggaaaccggtttgataactcccatcaaggtcggcggaactactacgatacgtgccatcaccaagttcgggaattttacggctacctgccatctgaatgtagcggaaggtgatgtgaaggtttccggcgtgaagctggataaaaacgccctgacgctggctccgggcgagaacgctcaattgtatgcgaccatcgccccggctgatgccgcaaacaagaaagtaacttggataagcgagaacaacgccgtagctaccgttgccgaagggttggtaaccggcgtgtcggcaggaagtaccatcgtgcgtgtcacgacagaagacggaggctacacagccgaatgtgtcgtgaccgtcgggaaaaaagaagttccggcaaccggtatctcgttggacaagacttccgtggaattggaaaaaggaaaagcgatcgtgctccgggccaccgtaaccccagccaacgcaaccaacaagcgggtgatttggctctcatcagacgaggatgttatcgcagttgatacaaccggtatcgtggaaggtctcgaggaaggcgaagcggatgtgattgccgttacctctgatggcaagcatgaggcacgttgttccgtgacggtttacgatccggctacgaaaccggaagtaattgccaaagacagctcggccgtgattgttttcgcccgggtggagaaagctgagaaataccgtttgcaactctatcgctacgtgggtaacacgccgatattggataaggaatatgtagcggatcgtttcggtaatataatcaacggcctgaaatcgtctgaacccgcaccgctagcatctacaggcaaagtggcggtcaacattgccggtttacgaccggatacgaaatacagcgtgaaaatcgtcgctttggataaatccggcaacaaaatctccaccgtaaccgccgatccatttacgaccgcgcagaatccgaccgccaatgaggagataacttccgtacagccggacgcttttgtcgcaaacaatgaattgattttggaaaatctggcaggttgtacctgttatgtagtcgatttcagcggacgcataacaaagatttataccgtaaaatcggaacatgacaggactcaactccaacaagaggccggaacttatattatcacggctgtaaaagatcaagaaatgtatttctctaaaaaggtagtgatccgataaatgttttatttctaaaaaacaaaaaaatgaaaaattttatacttttatttgccaccgcatttataatatttgcggcacaggcacagacacagagaacagtgcaagggattgtccgtaatgatttaaaaattgccaaaagcgctgcaaaagcagctgagacggacaagacgttctcgatgaaaaacattaagttttgggtgtacgacggaatcgaggaagccgattcattgaattgtaaccaagcagccctagtcatttcctggcacgacggaagtaagactaatccagatcatttggtctggggataccgttggccaaaaggagaagaaagatgcggtcttgatatggtagaagccgttgcgaaaactgataagcgtttgctcttgcttgtccaatataccggctctatgggctatacgattaatggtataggctatgaaaagaggagttcgagccaagtacaaattgcatttgatttggaaggagctaaaaaagctggtaatacttatccggaaaacgcacaaaaaatagctgataatgccattgtggaatctcagaagacagggttacttatacatccctttggttcagatggaacgagccgccctgcctatgattatgactattgggtaaaaaattcaaacggagatttccactggttggccggttggtacaacggttattggagttattttacccgtgatgcacaaacagcagactgggaatattcatcatggggagcatcaagccgtaaattaaccaacaacacctgggatgcctggagctacaatgccgacatgagcacttgggaaggaacacaaccgggtagtccgttagtagccgctacctatgccccaagaaacgtatcgaaagttgtagcagaacctacgacggaaacggctcccgaagccaaggttttctattcgaatggttctttgcgtttggataatttgaatggatatacggggtatgtgtattctatttacggttcggctgtatccaattttaaaatcaattctgatagcgaaacaaaatccgtaaacttaaaagcaggaatttatactttcaccggcgtgaaaggaaacgagaaagtttcgttgaaattttctgtaagataattaagatcacttatttttagagagatacattttttaggcccggtttgtttctacatggagacagaccgggttaatattttaatcccatttttattaatgtcaatattccgatagctcataatttcgttacgaggtatgcggatttttattcaacattatcagttcggcacttaagatccgtaggatagatgcctggcataccactccgagaatataggcataagtaatatgttacctcgtactcaatatataagggcaacgtcctacgcctacgcttcggtgatctttttattttattacatattaagaaattgatcgtgaccggagataagtctggttaaaatattttatctgggatatgaaggtagcacttaatttattcataaccagaaattgctcattcaatcattctttattagctttgttaaagctaaaaatattttctaataagccagataatatttgcattgatcaatatatgaaacggtttataacacaatctttgatgaataatttacacaagaaaaaagatgtatatgaactgacacgtcttaataatttatttacgagaaatgagataaacatacccggttttgatgactatcgagttttgaagtgtgattttcatacacacacggtcttttccgatggccttgtctggcctgatggtcgcatctatgaggcttggcaggacggattagatgcgatagctatcacggatcatattgagcaccggataaatcaagatttgttaaatggagacctaaaccaatcttataaaatagcgaaaacagcagccgacgatatggatttaatcgtgattccgggtgttgagataactcgagataaaccattggggcattttaatgctcttttcatccaagacgccaacctaattgaaaaagaagatccattggattcccttgctgaagctaaaaaacaaggtgcgttcattgtatggaatcatccaggatggccggataataatgtcacattatatccgatacatgaacaactaatcacaaaagggatcatcaatggcatagaggttatgaattataaggatttttatcccaaggcgattaattggtgcgtctcgttcaagaagacaattatggcaggttccgatgtccattgtactatttccggaatgtatagaaacagatttagacctatgacattagttttcgcaagggagaaaagtgaagcaggcatacacgaggctttacttgcacgacggaccatagctttattcgatggatatatggccggagaaatacaaattttatcccaattcgtaaaatcctgcattaaaataaaatacatgaaaaattcctgtatagccgtaacaaatgtatcagatatcccttttcatattttcaacgaggatgattcctatatgctaccggaaagaaagacaatcatgatgaggattccggcaaaccacctttggaccttggagaactgctttgttaaagaggacagtaaattgtccatttccataaatgaattgaggcttcaataaaaaacgattcgccctttttaatgaaggtgaagagttaaagcagcccttcggggaagggctagtcgcataggccagtacaaaaaacagttaagtatggctccttatcgtgcatgaggttacaaataccattggagaatgttttgtagaggcaaagttgttagtagtgcaaacggaagttcacagccagagggagtctttttccgtaagatatggaaaagtcggtagagttctattttatccgttaagagccaagttatacaggagaagtccgttagcatatggcatgattgtttcctctttcttggaaagaaaactgccaaggataattttttcgttccattttccatgttcacatcaggactccctttgattggatttttcgactttggagaaaaatccccagctaaagccggcaagttggttcttgtcggacaaaagactttttgtccgacaaggacacaacttgctctgttcgcttgaacagagaatcctcataaattcggattgtcacgcagtgtttacacaaaaagaggttttttctgatcaaattttgtttcaacatccgcttttaaatagaagtataaccacctgcttttctgttagtatccggacatctggtgacatttgatgacatctgatgtcaccaaagccgaatttggcagcatctgccatacttttgcaacgggatataaaaacggtgtcatgcccggtcaccggaatatccccatgtcggtgctccgacagttcctgctatcgacattccatcatgatgttatgtcaatatgtcaagaggaaaaaagaagaccgtattgtaagtatgggagtttctcacgacaagctccagaaatgtcgggaccccgtgaaaatgatacggtaccggcagacagccttcctgtatttttccggcactgctttggaccggcggggggcgggaatgttctcggaatgacatgacagtttcacgatatgggaaaccatcggtacaaggcaccggcgtgatttaaaaaggacgggacaacaaaacgattattaaccaatcattcggaagcctatgagcaaacgatgtgtctttgtcgccatgagcagtcagaaaggcggcgttggcaagtccaccatgacggtgcttcttgccggttattttcattacgtaatgggatataatgtcgcagtcgtggactgtgactatccccagttcagtatcaaggcgctgcgcagccgggatacccaaaatgtggaaaagaacatgaatctccagcgtatgttgtgcggacagttcgaacgtacgggcaagaaggcgtatcctgtccttaccagcgttccgggcaaggaactggatactgcacttcccttgacaggtgggtgtgacattctcttttttgatcttccgggaacggtgaactcgcctggagtcattaagacgattgtcaatatggactatgtgtttaccccgatcatacaggaccgtatggtgatgcaaagcagcctttcctttttattgaccctgaaagacttcatgctgcagaacccggacatgcctttgaaggaaatccgtatgttctggaaccggatggacgggcgtgtttccaaaaggctgtcccatcagtacggacttcttttcaaggagctgggattgaaggttctcgatacggtcataccggatatggagcgctatggcagggagacctcccccgaggagcggaaccttttcagaagtacgcttttccctccttccgggaaattgttgaaaggcagcgctcttgacacgctggccggagagatagaaggcattatccatcctgacagaccaaaggcatgagaagaaaggaatttatgaacgtgaatgaggaacgcctgaaagagatcatggcgcacgagaccgatgccgacggatgtccgaagacgcatccggacggaatagagaaagaggaagacaggggaaaggaagagacggagtctgtatccatacccgatggcaggacagaaaagccgactgttttccataagcccgctgtccggtcagggacctcccttgcggaaaggatgaagacataccgtgccgactatctcagccgcagggagtacgttcaccgcaagcagacctatatcagttatgagacctaccgcagactggcacgcatacttcccctgctcagcgagggcatgaccgtaccggcattccttgacaatgtgctcaaccgtcatctggacgagcatggggatgtgcttgatgagatggtccgtaccggtacacggaactcacactgacacgtggaacggcggggatgacagacgaaaaggcttggaaacctgtttgttccaccaatggagtgtgacaaaaagaaatgggcgtccggccgggtatgaacccgccggatgcccatttgtgtatatttattttacgtacagcctatctcaaaatcggattcgagagcagtatcttgtaatagaccgttccgttcacctccatgggtgtcttcgccatcatgaactgtacgcttttccgctccaccttcgcctgctgcatgagcctgtgcacaatgaatccggcggagaatctcgcgcaccttttgtccttccatacgatgaacccgtcatcatcggtggtacggcagatataccagtctcccgtatcgtcatcatgtgcgaaacttacccggcctccgccaaggacccccagttcgattgacatggtttttgacagatagacagttcccctgctgtccagattgatggtccgcttccccttgtacagaacctcctgcggacgggaattctccttgttgtatacgataagtgccatagtccttttctttttatgatgttattacaatgatttccgttcaggataccgctccttcgattaccagcatctggctcctccatgcaaaactcctgtgcgagcgcaccgcttccactatggcgcatactttctgtgatattgccatagctgagatgcccatgcattccgccagtgccttgaaagagaaactggcctcgtagaagcggagcatgaacatccggtattcgtcataagagaatttctgccggataaagcggagtatgtcctttaccagcctctcgcatccgtctaggtcgtccgtggagagaaactccgcctcctcaccgcatctgaggaaaaaatcgtcttcaggatgggcataccggttctctcttttcatctttaccagagccgcctttttgtagcatccgacaaaatatgcgtcataatccgttatgtcttttccgggaaccagtacctgctttcttacgaaaaggtaggtgtcatggaaattgtcctcgtccagcattccgtaccggcgtaacgtccctctcaatctgtcataggattttgtgaaccactcgttgaacagtctttccttttctgcgctcttgtctgccatagccttataattttttgagttatacatcgcctacacgggtaggcattcttatttcttgtgctttttccagtttgtttttcggcggtctccggcaaggcttgccgtgaaaaaatacgctcacgcgggagcgtgaggaagattttttcacgagcaaccagcccgcagggccgccttgcgggaccggcctgaaaaacaactttctttgccgcaagaaatgaggatgacagattgtggcacagctctttcatttaaccttgatatatattaataacttcctgatagtatttggtttacattcctagttatgtgaaatttctatatcaatttcatttgaaatgaggagattacgagctgctaacgacttatctgccatagcctttgaatttttgagggattttctttgaaaaagtgaaatatagagcaaaaaatctatctctagaatacgcttccaaattttatcactatatttgcaaatagaatcaacttatatacattgaatggaatttcaaaaagcttatggaaataacaaggataaacagattgaaaattgtattagctgaacaaaacaagacagggaaatggttggctgaacaacttcaaaagaatgaagcaaccatttcccgttggtgctccaacacttctcaaccatcattggaaatgcttgtaaagattgcagatgtgttgaaaatagatgtgcggaaactgattaatcacggtaataacgaagaatgatatggctaataaaaatctgaacaaggcgaaagaagcgaaaaaagacgagttctatacgcgacttgaagatataaacaatgaactgaaacattatcgcgagcatttccgtggtaaaacagtgttgtgtaattgtgacgacccacgtgtcagcaatttctttgcctattttgcctacaattttgaattccttggattaaaaaaattgattaccacttgttacaaaaatcaagatatggacttgttcagtcaaaacaagagtgaacaggctgtatatttggtttataaaggagataagaatggagaccatataccaaacgcagatgaaataggtgtgatgccattaaagggagatggtgatttcagaagtcaagaatgtatagaacttctgaaagaggctgatattgttgttactaaccctccgttttctttattcagagaatatgtagcacaactgattgaatatgataaaaagttcttgattattggacatcagaatgccatcaagtacaaggaaatattccctcttattcagcaaaacaagctttggcttggctatggtttcaagggaggagcaggtcattttatttcccattacgaggacaaagctaccgctggcgaccaccgtgaaggtatgatacgtgtttctggagtgacgtggttcacgaatttggaaacacctaaaagacatgaaaatattattctttataaaaagtattctcccgatgaataccctaaatatgagaattatgacgcaatagatgtttccaaaacagcagaaattccatgtgattatgaaggagaaatgggagtacctattacttttatggataaatacaatcctgagcaatttgagataataggaaacacatgtgatacagactggataagatctgcgggattcaaaactatggggcaagatacaattgacaaactgaggcaacaaggaaataaagcccatgtcacagccaacatgaactcaccatatatattgaaagaaggaattgtaatcttaccttatgcccgtatcataattcgtaaaattcaaaagtaattagccatgaagatagaactgaaatcaattaaaattgccgacctcattaacggttacagcaatgataccgacacaggcgttaaaggctttggaggtaaactggatatccgtccaccctatcagcgtgaattcagatacgatataaagcaacaacaggcagtcattgataccatattaaaaggatatccgcttaatatcatgtattggagtgttggcgaagatggcaattacgagatgattgacggtcaacaacgcacgttatctatctgtgagttctttacccacggttttaacatagaggacaaagatcgtggcacactctatttcttaactttaacaaacgaggaaaaggagaagtttctgaactacaaattgacggtatatttctgcaaaggaacggacaaggaaaagctggattggttcagagttatcaacatcgcaggagaaaagctgcttgaccaagaacttctcaatgccgtctatactggtccttttgtgacagatgcccgccgccacttttcaaagaatggttgtccggcttacaaactcggtgcagactttctaaacggtagtgccattgagcaggcatatctttcaactatcctcaaatgggcggcacgtcatgaaggcattacaaaagtggacgattatatggcacaacaccaattcgatccgaacgccaacaagttgtgggcttacttcgtgtcaatcattacatggatacgttccactttccctaaatatcgacgtgaaatgaaaggcttggattggggcgccatgtttgatgaatttggtgaatgcgtttatgatacggaagcactggaaaaacaaatctgtgacttaatggaagatgatgagattatgaggaaatccggcatctaccgctatgtcctgagcggtgatctacgtaatctcagttttcgcactttcgacaaaaaacaaaagcgcgaagcttacgagcgacagaaaggaatttgcgtacattgccacaagcactttgaattggaggaaatggaagcagaccacatcaccccttggaaagaaggtggtacgactatagtagagaattgtcaaatgctttgcaagaattgcaatagaattaaaggaggaaaataattatagatatgaataaccaaataaaacaaaatattacagaatgtcaaaatatcatagagcatattcgtaattctataaatgatgggaaatgtaatttttgccctaaatgcaaggagttaacaagcttgtataatgcacttaataaattatcaataagcattaaatcggatttgccaatcgaagagcagtatatacaagcatatttgccagcattagtcggagtgtctcaagttaatgcgtatgattttggaggtataatagcgatgataaatataattcgggcaaaatgcaatttgacgaatgataaacaaaagaatatattcatcagtcattcttccaaagacaaagcaatcgttcagctttttgttgatgatgttttacaattaggggctggcataaagccggagcaaatattctgcacttctattgaagatatggggattaagaatggggatgatatcagaaaacacattcatcaaaacataaaaaatgcggactattctttcttgcttatatcaaataattacaagaagagtgaaatctgtttgaatgaaatgggagcggtttgggcatacggtaataatgtcaagttatatctattgccaaatacaaactttgattgtattggatggttatgtaatacaagaatcgctgaaagaatagatagttcgatcgctttggacgaattgcacgaacaattgcaacagcattattctttgcataatacatccattaagagttggagtagactacgagagaaattccttcgggaaattagaacaatttaatcaattattgtatgtttcaagcagatgtatacaagataatgataggtgctccttctgacatcaaagaagaagttaacatagcaataaatgcaatacaccattggaataatataaatgcagaaaaacaaaagactgtattattaccattgcattggtctattagtgcatatcctataacaggaatatatcctcaaaaagcaatcaataagcaagtggtaaatagaagtgatttgctgatttgtgtttttggcgcaaaattggggactcccactgaagattacgcaagtggaagtgttgaagagatagaagagcacttaaaagcaggaaagcctgtaatgatattttttaagcaggctttgaacgttaatgatatagatgttgaacaaatttctcgtctgcgagattttaaaagagcgattggccaaaaggctttatatgtagactataatagtgctaatgattttgaacgaattttggaagacaagctctctctctgcataaatgacaattttataaaagacaaaattgttataaatgcaatagagtggaaggagattaaagaagacacttctcaagaagaattatcagactatgacaaagaacgactaaaattatggacttctgtggatgatccagacttttttcaagttcattttgaaggaggaggctgtgtatatggtttaggagcgacaaatcaatatgaaataaaaaatggtcgagaaaaaatagaatgggactctttctttgagaaacttttaaaacttgaacttattggaattagaggttatgataaacatagctatccaatttatcaacttaaagaagctgcgtataagtatgtaaaaacacataatttataatcaatcatatgcaaaccgaatcccaaaacatagagttcaaagaatcttggcgcgatgaatatctgagatggatatgcggattcgccaatgcgcaaggggggcttctttatatcggcgtaaaagacaacggcgacgtatgtggtacgccaggcactaagaaattgatggaggatattcccaacaaagtgcgtgatatgctcggtattttggtggatgtcaatctgaaagagaaaaatgaaaagcaatatcttgaaattgtaacagaggcatatccttatccgattagttttcgtggcaaatattaccagcggagcggtgccaccaatcaagaattgaaaggcgcagctcttgaccgtttcatgcttcgcaagcagggaaagacatgggacggtgttcctgtgccttatttaaaggtagaagatttggacaacgctacgtttgatttgttccgcaaatatgccaaacgaagcggacgcatggaagatgcagatttggtggatgataatcacggtttgttagaaaaactccgactttatgaaggcgactatctgaaacgggctgccgctttgttgttccatcctgacccggaacgatacgtgaccggagcttttgtaaaggtcggtttcttccgtgaggggatggatttggtatatcaggacgaaattcatggtaatctgttccaacaaattgtaaggctgatggatttgctgtgtaccaaatatatgaaagctgtcattacatacgagggtattcaacgtatagagacattgcctatgccgaaagaagctttgcgtgaggcattgttgaatgcctgtatcaataaggattatgcagaatcttctcccatccaaatccgcgtgtatgagaataaattagaaatagtaaatgggggcgtgttaccagacggttggacagtggagacattgttgtcctcacatcgaagtttcccctataatcccgatattgccaatacgttcttccgttctggggagattgaggcatggggacgaggtatagaacgtattataatggcttgcaagaacgatggtttctctataccggagttccgttatgatgcttcaggtatttggacgatattcaagtatgagtatccagaaagagcaactgcccaaaagactgcccaaaagactgcccaaaagactacccaaaagattgcccaaaacctgacgaagcaacaacaggctgtgctatctttcttaaaagagcatcccgaagcgacccgaaagacgataagtgaaagccttcctaacatcacagaggatggtgttaagtataatctttcacgccttcaagaacttggattattggagcgtgtaggaggtagaaagcaaggtttttggcggattgtagagtaaaagctttatgaatgatttagaagaatttgaaaattggcataaggatttgatggtatgggaacactttcaagatgaactagaaagaattagtggagaaaatatatcggataactcgcatgagttagacaatgaaaaatatctttgtactcagaaactttcacgcaaccttgtgtaaaacatagcaagtcaacagtggagcaataggagaagattactcttgtgtgttttctgaaaagcgataatattcaattattgggaaatatatcacgattcatgatggcaacgaaagaaaatctggaacttgttgtggtgaaaccgattttcccgttgggtttgccttttgcaaaggcatgaaaaagaaagagtagatattgcgtgtcttaaaacagactaacggtaactggagtgttgcggccgaaccgctcagaataggtaggacacacgatacaatgaactgaaagaatatggattgaaatataaatttcggcaatcatagtcgataatttattgtatttgtaaaagtatgctttaaaaagaataaaaatcatctttgaattttttctatttgattatttgacaaataggactttttttcgtacttttgcatataaggatttggatatgtgaatccaagcagaatggagaagacaggtggtttctaaatcattacctattcaatatgttactcttcttaaaacttttataatcaaatgattatctattagtgcaagaaatgtgaagcacccgaagaggaacatgtcacgtacgaggttggtctgttttttcacgaacacggcgttagccagggtgcgcagttcctcttccgtgaggtagcctcggtctgtctcctgcatttcaaggctgtactcgccgaaagggtcggaacggacgataccacgccgccatgccttgtctgtcaggctgagcagtggcatggtgtatatccaaagagtgttgtcactcaatcccttttccacacgcaggtacttgtcgaaatcggtgataacctcctttgtcagttccttgtaagccatatcggttcgtttcttcttctcccaaaggaaggtggcgaaatggttgtacacggccagatacttgttgtaagtggatttggcacgctgccctttctccaccatcgcctcaaattcccggttcatgttctcgaaatctttcaggatgcagttttccattacgccgatacccagaaaggcgttacgcagcttctcggcggtgacaaaatcctcttcccggagaatgcggtgatagtggttggtaagccgggcactgacttctttgagctgcccgtttatctctgtcgcctcggcggacttgccttttgccttaccattctcccataaatccggcgtaacgaatagtttggttcccaatgctttgtcatccccatcaatggagatcttcaccatgatgggggcttttccgtcccggtttctcactgccgatctcttgatgtagaacgaggtcgcaaacgtacttctctttgttttcataactctaaaattttcgtttctaaaggtagttaattatttgttaccaagagttatgcaaaacaacgcaaagttatgaaacagaacttgttatattccatatatcctctttaggactggtagctgcttagtagccgaactttgtctgaaaggggtattttcaagcgttttatgccaaagcttgtttcaatccgccctacatacaaaatactgacctccaattatttaagtagaactttgcttttctttgcgtcttatgccgattttttagcaaaaaactattatagagtggctgggacaatgtgtcgggattgcagttcaccgaccgttggtccgtgaaacaataaatcaatatataaattatttaaaacaattaacaggacaagatatgagcacgatagttcaatctgaaattattaatttgctttcgaaagctgaaaatatagagtctgttttgcaaataccgacctatatagaagccgtgaaagatgccattatgacaaaaatgattcaatctgtggccttggaatgtggcgtgaaaggtggattacggacagacctaaaggagcgtgagttttatttttataaggaatcatggaaagaaggaacttctatttattttggattggataaaggtgaagtttattatgcaattaaaacaaaagagtctctggatgggaaggctaagccggaaatatatctggaacatttatttgaagaaggaatagatgcgtttgatccttatggctatggatatatttgtgaatatgactggttgacaaataatcatatatgggtggagatggctgatggttcatttgccaagaagtatattattccttctgtaaagaagatacttgaatttgtcgaatgtgatgaaatgttgaaatcaaaattagaagaaagaaatgaaaacgtttaattgttggttgattgcgaatgtgttgccttacgtcgtagctataagttgttattttgctataggaggcttagggctaagaatgaattgtttttctttttgggattattttgtagtatttggttgtgggggtattttttccatcatagttatgatttatacatattgtaatatcgaggaagttctttcttgccgttttatatgggggaacagcaatgtgagtatattctcattttctttaatttatactcttagaaaaggaatattagcgttccttttacctggggcaatttatttttccatctttctttttttaatggaggataataagaataatgaaacagaacaagttactgaacaagtaaaggcaaatgcgaaaccatctgcttcagaaaagaaagatgccaaagataaagaggttgtaatggtttgcgaatatattgaaaaaggagattattatatttactatcctgaacagtgtatggcccagaatgataataatttggtattcctttcagagaatggaataaagatcgaagcatttttcaatgaaagtgaatcattggatattcattatcagaatggaataaaatataatgaagaacatgggtggaacacgacttacaaacatcgttcaaagacgggttattttttatccggaaagaattcggacgggattatttattatcagaaaactgtaaaaaaagatttcggtagttattatacaatccgaattgagtatccagaatcagaaaaagattttggggatcaatatattaaatattatataaagcgtttccctgagcaaatataaaaaaacgttaccggacgaggggaacggctgactgtcgtgcaaatctgtatctttcgctatgctgaatgtgatacagtccgaaaaacagtcggtgaaccagtatttccgacagatgatactttagtgccgggaatttttgtaacaaaaaaacggctcagtagatgtttttggtgaatgaagggtggcacatcgccactcttttttgatatatcaaaatgtcactaccaccctgtgtaaatcggattagtaccccatgttctatgaattaatatagcgggtaatatttttaacataataaaaagaagcgttttgcctgtttggaggaagcaaaatggcagattccgggagtggcgattcttggaaactgtttgaaaaaagtccaaaccgctttccaagtccgcgaatgatttgtacatttgtgacattatttaaaaaacaatgacggaagatattcaaaaagcctgcgaaattatgcaggcgggaggcataatactctatcctacagatacgatctggggaattggttgcgatgcgaccaacgagaaagccgtacaaaaagtgtacgagttgaagaagagaacggacaataaggctatgctggtattgaccgacagttcggcaaaactgagcatgtacgtgtcggatatgcccgatatagcttgggacctgatcgaagtggccgataaaccgcttacgattatctatcctcatgcaaagaatctggcgagcaatctcttaggtgaagacggaagtgtcggcatccgggtgacgaacgaagagttttcccgtaaactgtgcgaacgtttccgcaggccgttggtttccacctctgcgaacgtgagcggcgagccttctccgggtaatttcagcgaggtgtcggacagtattaagaacggggtcgattatattgtgaaatatcgccaggatgatatgagcaaggccaagccttccaatatcatcaaattaggagacggtggcgttatccaggtaatcagataaaaatgaagaagagcaagcaggctggaaaatacatattatcggattttatatcggcttcggtagcgtggttgctattcaatatccttcgctatgaggtgttcgccatcgatgagggagcagatagtctgcttgattatttgcaatatccgggtgtgcttggcggccaggtagtcattcctcttttctggctggtgctttattatttttcgggatattataacaagccgttcgggaagtcccgcctcaccgaacttttctcgacattcattaccgtgctgatcgggacggttttcgtcttttttgcattgctgctcgacgatattccccgttcgatcgatatctattataaactgttcttcggaatgttcggattgcagtttttcataacctatatcccgcgtctgctgattacgcaaagcgggatgaggaagataaagaaccgggagtgggcgatgaaggtgctgattatcggtgcgggagggaaggctgtccgcatcgcccacgatttgtatcgcctgggctatgatatttgcggctttgtctcggaagacgagaggacgccggtcaaggccgaccggaatcaggtgctggggacggtggaagatattccggtcttgatggaaaaagagaatgtggatgaaatcgttttagctgtcgagtcgaagaataataaggcgcttttaggaatcctctattcgctctaccggtataaacgtccgataaaggtgttggcggaccggttcaatatgctttcgaaaatacagcttcggacgatacggggaatcccgttggtcgatgtgacggataacaacttttcaccggccgaacagaacataaagctttttctggataaagtctgttctgtcgttgcactgctgttgctctctcccttattcgcctatatcgcatggcgggtgaagaaggattctccggggcccgtgtttttccgccaggagcggatcggttatctcggacagccgttttggatgtacaagttccgcaccatgtatgtcaatgccgaagagaacggcccgtcgctttcgtcggaagacgacctgcgtgtaacgccgttcggacgtatcatgcggaaataccggttggacgaattgccgcagttctggaacgtgctgaaaggggatatgtcgctggtcggaccgcgccccgaacggaaatattttatcgacgagatcgtgaaaacggctccctactactatctgttgcacaatgtccgtccgggcattacctcgttggggatggtgaagtacggctatgcggcaagtgtggacaaaatggtggagcgtatggaatatgatatattatattacgaaaatatgtcgctgacactggatctgacaattctgatctatacagttaaaacagtaattactggtaaaggcgtttgaggaattaagaattaaaaaatagaggtgttgattatgaaggataattttcaattttcaattttcaattttcaacttttctatcggttcctgttatggcgggacaagcatataaaagagaagcatttcatattgatcgtcagttttctggtcggtatttgtacggcagcagcagctattgtcctgaagtcgatcattcattttatacaacatcttctgaccggcaattttaatcaggatggggcgaattacctgtatctgctttatccggtgatcggtatcctgcttgccggtttgtttgtaaaatatatcgtacgggatgatatcagccacggggtgacgaagatactctatgccatttcccagcggaagagccgcatcaagcctcataatgcttggacttccattgtcgccagttccgtcaccatcggtttcggcggatcggtcggggcagaggcacctattgtgttgacaggggctgcgatcggatccaacttgggccgtctgttccgcatggagcaaaagactttgatgttgctggtcggctgtggggctgccggggcgattgccggtatattcaaagctccgattgctggggtggtgtttgtggtggaagtgctgttgttggacctgacgatgacgtcggtacttcctttgcttatcacttcggtgacggctgcgactgtttcctatatttttacgggtacggaagcaatgtttccgttttcccagaccgaagcgtttgtgatcgagcgtattccttatgtgctgttactaggtgttttctgtggtttggtgtctctctattttaccaaagtcatgaaccgggtcgaggggatgtaccggaacttgaataattactggaagaaattcgtcgttggggggatcatgctgagtgtgctgatcttcatatttcctccgctctatggtgaaggttatgatacgatttcgtctttgttgaacgggcagttctcccatataatggataagagtatgttctatagtctgaacgatacctattggggattgcagatattccttacgctgatcttgttgtttaaggtttttgcttcgagcgcgacgaatgctggaggcggttgtggtggtatatttgctcccagtttgtatttaggatgcattgccggattcgtgtttgcgcatgcgtccaactattttccctttacgatgtatctgtcggagaagaacttcgccttgttgggaatggcgggtatcatgtccggtgtcatgcatgcgccgctgaccggtgtcttcctaattgccgagctgaccggcgggtatgctcttttccttccactgatgatcgtatctgtgagctcctatatcacgatcaagatgtttcttccacacagtatctattcgatgcgtctggcccagaaaggggagttgcttacccatcataaagaccgtgccgtgttgacgttgctgaataccgacagtgtgatcgagcgcgacttcctgactgtctctcccgaaatgtccttgggagatatggtgaaggtgattgccaagagcgggcgaaatatgttccccgttatcgacgaacggggtatcctgttggggcttgttctgttggacaatatccggaacattatgttccgccctgagttatataatcggtttcacgtctccaagttcatggtttcggcacctgccaagatccaggtagggacgccgatggagcagatcatgcgtatctttgacgatacgaaggcctggaacctgccggttgtagatgaggaaggacggtatatcggttttatgtccaaatcgaagatatttaattcataccgcgaagtgctggttgaaaacttttcaggagattaaaaaatgaagaaagaagatttacgaatcgtttatatgggcactcccgattttgcggtggagagcctgcgtgccttggttgaaggcggatacaatatagtaggggtgattacgatgccggacaaaccggtcggccgtcatggcagtgtcttacaggcaagcccggtgaagcaatatgccctgtcgaagggattaccggtactccagcccgaaaagttgaaagatgaggcttttctttccgagctgcgggctttgaaagcggacttgcagatcgtcgtcgctttccgtatgctgccggaggttgtctgggatatgccgcgtctgggaacgtttaacctccatgcctctttgcttccccaatacaggggggcagctcctatcaactgggcggtgatcaacggagatacggaaaccggtgcgaccacctttttcctgactcacgagatcgacacaggtaagatcatccgccagaagcatttgcctatagccgatacggatgatgtggggatcgtccatgacggcttgatgacgatgggagccgggctagtactggaaaccgtcgatttgttgttggaaggaaaaacagatgccgttcctcaggaagaattttataaagatccttccgaactccgtcctgctccgaagattttcaaagaaacttgccgtatcgactggcttcagccggtgaaaagggtttatgacttcatccgcggcctgtctccttatccggctgcctggactgaaatcgtttctccggagggcgtgcgcaccgcgctgaaaatctatcaggcagagaagcgccctgccgcacatgaacttcccgtcggaaccatccggaccaaccgtaaaagctatatcgatatcgcggtggaagacggctatctgcgcctgctgtcggttcagttggcaggtaagaaacgtttgcctgttacggacttcctgaacgggttcaagcagataggagaatataaagtcgattgataaaagaaggaagatgtgtcgaaagcccctttgttcccgcgcttgacggctatgccctcaatgtgggaacaaagggtgaattcgacacatctccctatgttcggtgttacctgtatcccggcttatttctgtttccggctgaatttgtccaataccttttcctggaataactgcatcaactcgtagaagctggggataaacatcgttgcaaaaatggtgtttaccgccatgccgaatacgactgccgctcctaaggatagacggcttcccgctccggctcctgttgcaaacagcagaggcatcacccctaagacgaatgcgaatgaagtcatcaggatcggacgcagacggacatggccggcttcgagtgcggattcgcgtatcggattgccggccttatggtagtcacgggcaaattcgacaatcaggatgccgttcttcgcagagagggcgatcagcaggatgataccgatttgtgtatagatgctgaccggcacgcccatgacgaaacaacccaaaatggcccctaacagggcgatcggaagtcccatgatggcggcgattgggcttgtccaactttcatactgggccgaaagaaccaggaaggcgaccaaaagagccattgcaaagacgagcatggtggtggagcctgctttcgtttcctggtaagcgacggatgtccattcatatccgaaattattgcctaattgctcctgtacgagttcttccatagcctggatcgcttcgccggaactatatttcggattggctatgcaggtgatggatgccgacttatacatattgtacaggttgatctgatccagtcccaactgctcctttacttccgtaaaggcggagaaaggaaccattttgccggaattgttttcgaggctcaggtgcaacacgtcgtctataactttttgagcttggtcgtaggcctcgatctttacctggtagatacgcccgaattcgacgaagtcgtttacataggcggctcccatatagtagcttagagtcgcgaaaacctggttgagctgcaggccgagcaattgcaccttgtcgcggtcgatagccaggttatactgggggacgttggcttggtacatgctcgaaaggctgagcaattgcggcttgctccggtacgtggcttgcagtgtttcgatagcatgctgcatctccgtcgggcccagattattacggtcttccaattggagttgcaggcctcccgaagctcccaatccggggattgcaggggggaccattgcgaatatctgtgcttcctggatgccgtaggcttcgcggttgaaacggtttacgacagccgaggcggtatgttctttgccttttcgttcgttccagtttttcaggatcacgaaataggtccctgcgttcgagagttcgccgccacccatgatagagaaaccgtttactccgatataggtcttgatttcaggatagctgtcgaggatcttgtcgatctgctttccgactgcttccgtacggttcaggctggctgccggcgggagctgggtggatatcaggaaataaccgtcatcctcttccgggatgaaagtggtcggccagcgcataaacatgacgatggcaatggccgttatgatcccgaatatcaccatcgtgacaaacgggttcttcagcatgcggccgacgatgtcgtcatatattttctgggttttgccgaacaccttgttgaaggctttgaatacaaagaatttcggttctttgttcgcttgcaggaacagggcgcacagggccggcgtaagcgtcagcgagttgaacccgcttaagacggtggcggcagcgattgtcagggcaaattgtttgtataattggccggagataccgctgatgaaggtcgtcgggataaagaccgccagcaataccagcacgacgcctacgatcgggccgacaatttcacccatagcttcggtcacggcttcacgggcggtatatttccccgtatccatcagccgcgacgagttttccaccaccacgatcgcatcatccaccacgatcgcgatggccaggatcaacccgaacaaggtcaacgtattgatcgagaatcctaaggccgacatgaccgccagtgttccgatcagggagacggggatggtgatgcaggggatgataacggcacggaaattctggaggaacaggaagataaccagtatgacgagggctgtcgtctccaggaaagtgacgagcacttcgtcgatggaggcattgattacctgtgtcgtgtccagtgtcacatcatagacgacgccttccgggaggttgcctgccaactgttccattttggcccgtacccctttggccacttccagcgaattggaaccggggagttggtaaatggctatggcggcactcggctgtcctttcagtttggaggtgacattgtaggaagaactgcctaattcgatacgggcgacatctttcaagcggagtatcttgccgccctcttccgtacggaggatgatgttcccgaattcttccggagtcgtcaaacggccttttaccgtcagtgtgtattggaacggattgtcggctttggctatcggttgcccgacgtaaccggccgaaacctgtgtgttctgtgtcgagatcgcctggaagatcatatccggcgtgaggttgcggatgcgcatggcgttcggatcgagccatatacgcatgctgtagcttccggctcccatgacactgacggagccgacacccggcagacgcgtcagttcgtccgtcatgttgaggctggcgtagttgctcaggtacagcccgctgtaagtggagtcacgggagcttagcgtcagcatcataacgatgttggacgattgcttcttggtggtgatgccttgtacgatcacggcttccggcagactgctttgtgcaatgctgacacggttctgcaccatgacggtcgccatgtcgatatccgtaccgacagcgaacgtgatggttagtgaataggctccggaactggatgaataggaactcatataaagcattccatctacaccgtttacctgttgttcgatgggcaatcctacggtctgcgctactgtttccgcatccgcacctgggtagaaagccgatacctgtacggtcggcggcgtgatttccggatattgcgcgatgggaagtatgtgtagcgtgaccaatccggctaccaccaggatcagggcgaggacggtagcgaatatcggtctgtttatgaagaattttaccatagctttttattttataggcttaatactcataccgtctctgactttcagcagggcggttgtcacataccgttcgtcggggcggataccgctgatgacctgccggagcgtatcgtccaccaactgtccgggttcgatatggcggtatcgtacgatattcgaatcgttcactatatagaggaattttcccaactggtcggtcccgatagaggcgtcgcgcacgaggacagcgtctttctgttcgctgtagggcaaggtgattgtaacatacagcccacttttcaattcgccgtctttattttcgagattggcgcggacgttcagcgtaccggtcgacaggtcgacgttgggagagaggtagtcgagtgtcccggtataactttgccgtccgtcctgtccgaggcgtatggaaacatgggtaggcatcttgacgttcggatcgttctggtcggcaatcattttcatccgcatgaactggttgtcttcgatattgaagttggcgtacatgatgtcgtctttgtataatgtagccaatgtgacgggttggacagcgccgttgatatagttgcccacatcatagcttgcacgggtgacacgcccgtcgtagggagcccggatgtagcaatagcccaggttggtccgggctgttttcaaagcagcttcggcattatgcacggatgcctccatttccgctgcggtcgattcggcctgcaagacctgtatttggctgacagccccgcttttggctgcttctttcatgcgttcgtagttgctgcgggcatattcgacctgggcctttgccgtgtttagcgcggcttccgcctgggtgacattattttggtacacttccggttcgatcacgaatatcaggtcgcctttctttacttttgcgcccggcacgagttgcgaggattgcagatatccgttcacgcgcgctaccaggttgaccatgcggtcggaactcaaatagcctggatagtcttttgtgagcgtgatgtctcgcacgaccggtgtcgctacactgatggaaggggccggcatctccgtctggtgacttttctctttacacccggcaagcaggacgatggacaatcccatcatccctattttaatagcagtcttcatctctcttattttttaattcgaataatttttaattctcaatctcccaaccgccgcctaaagcctggtaaagctggatcaggctcaagagggacgatcctctggcttgtgtcagttcgttctcataggagaggagagaacgttgtgcgtccaggacattttggaaaggtgtaagtccttgtttatagaggtcgagcgaaagttccaacgtttgtttcccttgattgacgacttcccggagcgcgacgatctgcttgatcgagttcttatagaaattcatggcattgtccacttcctggacggcagtcagtacatcctggttgaattgccggatcgactcgtcgagctgggctttagccagccgtgtcgcctgcgccaactttgttccttgaaagaaattccaggagatggcgggagcgatctcgtaggtgaagctgttatgatttaccagtttgtccaaatcatgcgaagcgaatcccaccgaccctttgacgaaaactttcggccaccagtctgatttggaggcgccgagcgatgccgcccgtgcgtttaccaggcgttcagccgcccggatgtccggccggcgtagtagcaggtttgcgggaatgccgatgccgattgtctcgatgtattccggcaatggcttccgtgtttccatgatttcccggacgtcccagggataaagtcccatcagtacgcccaaagcgtttgtgtactggatgattccggcttccagcatggggagagaggcttttgtgtcgtagtagacggataaggcctgtgcgacatctaattttgagacaagccctgtttcgtaccttttttcagtgatcttgacgaccgcctgttgcgacaggcagttctttttgaccacttccacttcctgttgcagttcccgcaagttgatgtaggcggatgccacttgggcgcaaagggagaccatcacggcgttgtagtcctctttggaggctgcaaagttctccttttgggcctttacgcggttgcggatgcttccgaatacatcgatttcccagttcatagacagggcggcatcgctgtattgggttattgtctgcggcaggttgcttgtatgcccgctactttgttgccgggtccagccggcagcgagtcccagggttggcgaatagctaccttgttgtatacgcagattggcttttgccatagcgatacggtctgccgccatcagtacggagtagttctgctttacggctacttcaatcagcgagtccagggtgggatcattgaagtttttccaccactggtcgtctaccggtaatgtctgttgaaaatcactgtcgttttcctgccacgcttccggtaatgcgtgatccaggtatttgtgttctttctgcgccggcagcgttatcggcaggaacaggcagagcacagcataacaccatgtacgtatgtgcataattttttgtttagatttagccattaaagaacagacttgccgtataattgtttgcctctttttatttctttctgtttattttatacgtgggatgctttgtatctttgccacgaaatgaaatgagaataacaatgggaaagaaagaagaatataaagaaaagaatctacggtttttagaagaagtggctaccggtgagggagtcgtcaagctcccttgtggtgtgttgtataaggagatagagaaagggaccggtgtggtttcaccggaactgacggatgtcgtctctgtccattaccgtggaacgctggccaacggacgcgagtttgataattcctggaaacggggatgtccggaggcattacgcctcaatcaggtgatcgaaggatggcaggaagcgctccggcggatgcatgtgggagaccgttggatgatttatatcccgtatacattaggttacgggacacgtacatccggtccgatccccggttattccacactgctgttcgaagtcgaactgttggggattgcataattttccttaaggctctttttcagtttccgatagacatatatgaatgccgggacgaggaagaggtctgctgctatccaggcggtcggatcgccaaagcaaacagctaagaatccgaatatcggtacggcatagatactgaccagtgtgcgtgcgatcatttcggaaactccggaaagcatcgccagattggtgtatcctgcgccttgtatggtgtagcgcaggatacagagcagccctaagatcggaaagaaatagcaagaaacgtgtaggaagagtaccgtgtttttaagtatttccgtttccgaagcgtctacgaacagcaatgatatcttgtcggaggccgacatcagtattgtaaaagtgaagacggcatagatcatcatcagcagcgagctggctttgatcccctgccagatgcgttcgggttttccggctccgtagttttgccccgtataggtagccatcgctatacctaagctttcaaaggcacagataaagaacatcttgattctcattgctgctgtgaatgcggctacacaagctgttcccaaagcgttattggcactttgaagcaagatgctgccgattgccgtaatggagaattgaagtcccataggtactccgatatataaaagatttttagccagtggaaagcggaatttgcggtcgtcagccgtccctttcaggaccggaaaatgcttgtacatataaaaataacagagaagtgccgacacaccttgtgacacgacggtggcgataccagctcctaacacgccccatcccaacacgaggatgcagaacaggtcgagcacgatgttcaatacggtagagaacagcaggaaccaaaaaggtgttttactatcgccgagtgcacgtatgatgctggacagcaagttgtagaagaacgtacaaggtactccgataaacgttacgagcagataatagtaagctccgtgaaaaatatttttcggagtctgcatacttctcaggatatctgcacagtatacgcttgtcagaaccgcaatgacgatcgacattagggctgccaattgtaaactgaccgtcacgaaccgtcgcattgtcttgtagtctctcgccccgaatttctgtgccaccggaatcccgaacccgcaacaacacccgttgcaaaatcctaaaatcaggaatacgaccgaagtgcttgccccgattgctgccagatcattgatccctaagaattttccaacgatagcggcatccacaagcgagtaggtttgttgcaatatatttccaagcaacagggggaaggtgaaattgagaataagcggcaggggagcaccctccgtcatttctttagtagtagttgccataaatgtgatacctaaacaattttgggagacaaagatagagaaaaggatgggaagttgttccgataagtgtatacagatagcaaaaaatagcgatgaaacttcaatgcctcatcgctatttttttattaagcttaatcgagttattctcctttttcgatctgttcctgtacgatcgcatctacgacagcgacagtcgtcaggttcaggatgtcacgcgtagaactttccacgtcggtgaagtggatcggtttgttcaaacccatctggatcgggccgatcgtttcgctgatgccgagtgtgtcgagcaacttgtaagcactgttggcagaactcaggttcgggaagatcagcgtgttgacatctttgcctttcaacttgttgaacggatacatgtcgtcacgcagtttcttgtccagagcgaagttgacctgcatttctccatctaccatcatgtccggatagtttttgtgcagatagtcgatcgcgtcgtggaccttcagcgggctaccctgcttgtcggaaccgaagttggagtatgacaacatcgccataaccggttcatgcgcgaagaacttcacggcatcctgggtcaggcgggcgatatcgatcaatacttctgtcgacggatggcggttgatcagcgtgtcggcgataaagaacgtacctttcttgcaagtcaggatattcagggcgccgaaatgcgtataagacggacggataccgatgatctgctctgccattttggtcacttcggaatagcggctgtaaacgcctgtcacgaaagcatcggcatcgcctgtcgcaaccatcatcataccgaatgcgttgcggtcgaccatcttttcgcaggcttccgcatacgtgacaccttcgcgggctttcttctcagacaggatcttggcataacgatggcggcgttctgtctcgcggtcgtgacgaaggttgacgatttcgatcccttcgaggctgatattttcttcggctgcgatcttttgcaggcgttcttcgttgcctaaaaggatagggatgcagataccttcggctttcgcttcggcagcggctttcagcatattgacatggttggcttctgcaaataccacccgtttcgggttggctttagccatatcggtgaacgaacggagcagcttgttgtcatatcccatcatttcgcgcaagtggttggcatatccttcccagtcggtgatcgtccggcgggatacgcccgagtcaatggctgctttggcaacggcacaggagacacgagtcaggagtcgcgggtcgagcgctttcggcaggatgtaatcgcgtccgaaagtcgtccgtttcagtttgtaggcagcattcacgacgtcgggaaccggttctttggcaagtccggcgattgcgtaaacggctgctaatttcatctcttcgttgattgctttggcgtgtgtgtccaatgcgccgcggaaaatataagggaatcctaatacattattgatctggttcggatagtcggaacggcctgtggcaaaaataatatcgtcgcgtgaggccattgcatcggcatacgagatttccggattcgggttggccaaagcgaacacgatcgggttcgtattcatggagcggaccatatcttgagtcaacacattggcgaccgataatcctaagaacacgtcagctccgacgacggcttccgtcaatgtcttgatgtcgcggtcggtagcgaagaatttcttggattcgttcaagtccgtgcgatgtgtggagataacccctttgctgtcgcacatgatgatgttttccttccttgcccccaacattatatatagtttcgtgcaagagatggaagcggctccggcgccattcaccacgatcttcacgtcctcgatcttcttccctgcgatctccagcgcgttgatcaagcctgcgccggagatgatagctgtcccgtgctggtcgtcgtgcatgactggaatatccagttcttctttcaggcgtgtttcgatcttgaaacattcgggagctttgatatcttcaaggttgatgcctccgaaagtgggtgcgatggcctttaccgtttcgataaatttgtcagggtctttctcgttcacttcgatatcgaatacgtcgatacctgcaaagatcttgaacaacagtccttttccttccatcaccggcttgccggccaacggaccgatatctcctaatcctaatacggcggtaccattcgaaataacggcaaccaagtttcctttagaagtatatttgtaagcatccaacggattcttttcgatttccagacagggttcggcaacgccgggcgaataagccagcgacaaatccatctgggtactatagggcttggtgggaacgacttctatctttcccggcttgccttccgcatgatagcgaagtgcttcttctttagtgatcttagccatagattattttatagtttttaatttgttgtttgtctttcgaaaattgcacacaaaagtaacaaattattatgaatatggtgtcggtcgcttacatttagttgctcgaattttgtgtgtttgctggtctcggctatttgttttatcttcgcacctttaatttaataggggggaatgtgaaacagacaatggctaaatatatgaaatggctgctgccggcactttttatagtgtactacagtagtatttctttatttatgcacgtccatgtcgagaatggcacgacgattgtccattcgcatccattcgagagagcggcagacggcacctaccatcatcactcgtctctttcggaaatccagttgttccatttgctgacgactgttcatgtgcaggatggagccatccattcgctgcttctacaaatttatgttacaccgaattataaaataattgataatccggtctatccggattatttggtccctgtcttagggaaactgtctctccgcgctcctccttttgtctgataaaatagcgtctgtccgttagtggagtatcaaaaagctttcaccttctgaaagatagtaaaaataaagtttcagtttgtttcatataggtgaaactttattttccctggtaggaaactttattttccattgcatgaaacaaaattttcgtgcaatggaaacagctgttgtctgcaaggctttccagcggcagatgcataaggtgtgtatttgttttttaatcattattttatcaaaacaaacgaaatgaataaaattattatacttatactgtgtctgtgctgtgcctttacgatcgcgcgggcggaggagggtcctgccttgaatccatcggacgcgaacattgtcggtcatgtggtggaccggaaaaccggcgaacatttgtcctttattacgatctttttgaaagggacgactatcgggacttcgactgacggcacggggcattattatctgaagaacctgccggaaggagagtttatggtcgtgatgaagacgatgggctataaaacgatcgagacgcccgtgatgttgaaaaaaggtaggacgctggaaattaactttgaggtggaagaagaagccttgtctttggatggagtcgtggtttcggccaaccggaacgagacgactcggcgtatggctccgtcgcttgtgaacgtgctggattcgaaaatgttcgagacgacgcatgccacttcgcttgccgacgggctgaacttccagccgggcgtgcgggtggaaaacaattgccagaactgcggtttccaacaggtgcgtatcaatggactggaaggtccttacacgcagatattggtggatagtcgtcccatattcagtgcactgacgggtgtgtacggcctcgaacagattccggccaatatgatcgagcgtgtcgagatcatgcgtggtggcggttccgctctttttggttcttcggcgattgcaggtacgatcaatatcattacaaaagagcctttgcgcaactcagcccagattgcccattcgctgacgatgatcggaggaagtcgcccggacaataacacgaccttgaatgcttctttggtgacagacgaccataaagccggcgtctatcttttcgggcagagccgtcatcgttcagcttacgatcatgacggagacggcttctccgaacttggccagttggaagcccgaacagtcggtttccgttcttatctgaagacaagcacctattctaaactgggtttcgaatatcataatataagcgaatatcgtcgtggtggcgaccagattaaccgaccgcctcatgaagcgtgggtggcagaacagacagatcacagtatcaatggcggtggtctgaagttcgatctgttctccaaagattataaacatcgcctgaacgtctatacttctgcgcagcatacgaaccggaagagttattacgggactaatcgtaatccggatgcatacgggcatacgacggacatgacggttgttgccggttcgcagtattcctattcggttgataaatgtttgtttatgccagcagaatttaccggcggcctggaatataattttgacgagctaaaggacgaaatgttaggatataatcgtatcgtggaccagacggttcatatcggtagcctgtttttgcagaacgagtggaagaatgagaaatggagctttctgatcggcggtcgtttcgacaaacataatctgatcgatcatctgatctttagtccgcgtgcgaatgtccgtttcaatccgaccgaggacatcaatcttcgtttatcttattcgagcggtttccgtgctccgcaggcgtttgacgaagatttgcatgtggcggccgtcggtggtgaagtggcgattatccagcttgctgaggacttgaaagaggagaagtccaagagtatcagtgcctcggcagatttctatcatcgtttcggtccggttcagttgaacctgttggtggaaggtttttatacggatctgagcgatgtgttcttcttgcaagaaaaagggcatgacgatcagggaaacctgattatggaacgtcgcaataaggatggagcccgcgtgatgggagtcaatttggaaggaaagatggcgtatgcctggctgcaacttcaggcgggtgccaccatccagcgcagccgttataaagaagccgttacttggagtgagacaaacccggatctgccggcacagaaaaaaatgttccgtacgccgaatgtgtacggttattttacctccacctttactccggtcaaacgtctggctatttctttcactggtacttatacgggaaccatgctggttcaacatctggccggctatattccggaagaccgggaagagaaaacgcctgatttctttgatttgaatatgaaggtcgcttacgactttcctttgtataaatcggtgactttgcaggtgaatgccggagtacaaaacatattcgaggcctatcagagtgatttcgatcaaggcaaggaccgtgactccaaatatatctacggtcccggaatgccgcgcagttattttgtggggtgtaaaatcagctattaaacggtgaaaaaagaaaagtccggtaagggtttggtgtctttaccggacttttttatttcgatcatttgtcagaatcccgttgacgaatttgtccgctgtatttattcctatatttttcttatgccaggcatagattgctcgtgcttcttttcttgctgtccgattccatctttcctcgttggagatcgtggataagccttttgacattcttttttaccttggcaaaacttttgttgtcaagaccggtaattgggttgaacagcccgagacgttctccttgtaaattcaatgtattattcatatttttatttatttaggttttgtaatgttcaaaaatgtagctctttttcagcaggaaagaaattatttcatagcaaattgacttgatgggaccgttaaagcgtggagatagtagtacggtggctggtcaactgtactcagcggggtgttgccccctcgaagctggtatagctatgccggcttcggtaaagttgttggcgatttccataccacccgtacctcttatcaccccaagttgcgattgagcgttctaaattctatagacttttattgatctcgtcgatgtaattaaggattttatcccttccttctttcttctcggaagaggagaggaggatggggggaagttcttcccatgattctaataatttcgtctggtagactttcaggttttcctgcaaacgacctttactgattttgtcgatctttgtgaagatgagagaaaaggggatttcgttttccccgagccattccataaactccaagtcgatcttttgcggttcgtggcgacagtcgatcaggacaaacagattcgtgagttgttcgcgttccaagatataatcttcgatgatccgttggatattttcgcgtccctcttttccccgctgggcaaaaccatagccagggagatcgaccaaataccattgtccgttgatgaggaaatggttgataagcaacgtttttcccggtttctgcgaggtcatggcaagccctttttttccagttagcatattaataagggaggatttgccaacattgctacgcccgataaaagcgtattctggcaggtcacctgtgggacatttttttacgtttgtgttactgataacaaattctgcacttttgatttccattgaaacggtgttttaaatagacaattgacaattgacaattgaatgtctcttgccatcgtcgcttgtcatgtgttaatactcttttttctaattgtcaattgtccattgccaattgaactaagccacaatcccccaaacgtgatagccccgtttagcatcaacatctcatagccgaaagcatatcccgtatgctgtttcactaaataatctgtcaggaaacagagcaaaggagagacgatacaaatgtaaggaacaaatttgtcacgaggatgtttttttgtaaataacccgaatacaaaaaggccgagtagcggaccgtatgtataggacgcgatcatataaatggcatcgatcacgctccggttattgattgccttaaatgcaagtatgatgatagcaaaaaggatggagatcattaaatggactaccaatcgggtacgtttggcagattgtgccttttccttttcgacccctaaaatgtcaatgcagaaagaggtcgtaagggctgtcaaggcagaatctgcactgctgaacgctgccgcgatgataccgattgtgaagaagatcaggatcgaatgtcccaatatgccggaggtgcagaacattgggaggatatcgtcgttcaatgcgggcagttcgatctgttgctgcgatgcaagcgtcagcaataggacgccaagcgaaaggaacaagaaattaaccggtgtgaaagcaaagccataagtgtacatattcttttgtgcgtctttcaaactcttgcaggaaaggtttttctgcatcatgtcttgatcgaggccggtcattacgatggtgataaagatgccgctaaaaaactgtttcatgaaatgttgtgtgctgtgccagtctccgaactcgaagatacggaagtgctggctggcttgcaaggtctgcaccatgcctgcaaaatccagttgcatcttgtctttcacctgccagataattacgattagcatggcgactaggcataacgcctgaagtgtgtctgtccagatgattgttttgataccaccccgataggtgtagagccagactaggaaaatactgataacgactgttacggcgaaagatatgttccagtacgcgaaaacataatgttgcaggatcaacacaactaaatagagcctcgccgccgcccctacgatcttggacagaaggaaaaaggaagcccctgttttataactatgctgcccgatccggtcatccaaatacgaatagatggaagttagttgcagcttataataaagtggtagtaacactttggcaatcagtatatatccaaaaaagaaccctaaaaccgtctgcatataggtcatgtctatgctgcgtaccatccccggaacagaaacgaatgtgacacctgaaagcgatgtcccgaccattccgattgatacgatgtaccaaggtgatttacggttaccaaggaaaaacgcttcattgcttgagctcttccgccctgtgatccaggcaatcagtagaaggattccgaaataagcgactataataaagaggatgatatagctattcatgatttgttcttaattttaggcaaagatgcggataaaaaatgaaaacgatctgtaatatttctcgattcatcggtgaaatttttgttttcgtaggaaaatttgggctttttgtatattttgttttgcgtatgttattaatttcttgttcctttgtatcagctggagctcgggagagtcaaggcgaccggtttacaaaaccggagacaaataggtaaacacaataaagaaaaggctgcgatcttcggatatgcagcctttttgatttatgtgtcgatgataaatcataaatctgaaatccctcaatatcgtttttcaatagaagctccagaaaagtaatgggagagaatctgccggtaatcatatccttcgcctgccatcatggcggccccgatctggcatagccctacgccatgtccccaaccggcgccggtcaggacgaaacgtccggggatatcgaattgtatatcttctttgtccacgacaaaagccgagctgtacagatgtgtttcggacaaggtccggcgtatctccaattctttgccgatggtaaaggtccgatgcgtcccgacaatcttcagcatttcaatacggccggaagttcctcggttgacgggaaccaaatccagaatctgaccgaaatcaataccgcttttacgatggatcagttcggctaattctttctgcttgtagaatactttccagcgataaaaatctgtcgtctcctgatcgtagttgttcaacacttggcagaggatctttttgtcggctgtattgcaaaaagcgttaggagcagagtgaatccatttccgggcctcttcttcctgagtgaggtccggaaaagttgtttcccgactgtccctcaatgctgtcaggtaagaatgggggatcggttcccagcaatgttcgaactgttccgttacacctccgcaacatttggaaaagcgggcatcgcagatcgtttcgccattcaccagtatttctccctttgtttcgtggatcacctcttggacgatcgggttggaagcacgggtaattccttggtagcgctgacaatggtcgtcggcacagacatcgaaaatgttatggtcttcgcggtcgtaccagcgtatcagttgctcgttatcccggtaacagttttgctgcttctcctctttccttcccaggcggaagttcttttcgatctgtgcgagcagccagctgcgtgaaatgacggcatgtgcctttaacagttcctttgaagcttgcgcgctcatttctgaagaaatgacgctggtcagatattcttccacatccacttggttgatgactacaattccattttcgccagtcaccaggttgaaagcccctttgaaacattggtcttcttgccgttgccaatggaagttacggcctatggtgactgccttcaattcgaaagacgaggaaggggaagccggttcaaagaatatttctttaaacaacctcccgttgtaaacgatattgccgtttacaaataacgcgcgttgttccccagtcaggaactttccagtttccgtatgtacatactctccatgaaatacaaacgaaacggccttttccgtcataatgccgacgttgactactggtgcttccaatgcttttatgatttatgatttcagatttatgatttatcatcgacgcataattcataaatctgaaattattattatttttcttccttttcttttaacgaactaattgccaagtaggcgattagcaggatgtacatcacgatggccagtaccccggctgaattactttccatccatttgatatcgactaggttgatgccggcgaaacgcatggctgcgctgacgactcccatcaaggctccgcctgcgatgaaaccggatgccagcagagttcctttttccagacgtacactgttcagagcttggtctttgctacggcttcctacataccagctgatggcgcctccgatcagcaacggcgtgttcaactccagcggaatgaacatgcctaatgcaaatgccaatgccggaattttacagaagtttaggatgatggccagtacggctcctatggcatacagtgcccagggagcgcccgagccgctcatcaatggctcgataaccgccgccattgcattggcttgcggagcggcgagttgcccgcttgtgaaaccgtatgtctgattcaggatcaggattacaccgcctacagttgctgccgataccagggttccgaggaatttccaactttcctgcttggctggtgtgctgccgatccaatatccgatcttcagatctgtgataaaaccgccggccatggaaagcgccgtacataccacacctcctataatcagtgccgataccatgccggctgtccctttcagcccgacggcaaccagaataatagatgccaagatcaaggtcatcaatgtcatgcctgatacgggattggtcccgacgatggcaatcgcattggcggcaacggttgtgaaaaggaaagcgattataccgacgatcaacagcccgatcaacgcgtagtaccagttgtccagcacgccgaagtgaaaaaacaggtacgtcacgatcaacgttgcgaagatgccgatagcgatcactttcatcgaaaggtctttctgtgtacggatctcttccgtttgcacgattcccgtttttcctttcagctctttggctgccaaccctacggctcctttgatgatcccccatgaattgatgatcccgatcacaccggcagtcgcaatgcctccgataccgatgtggcgggcgtaggtggtgaaaatctcttccgcactcatgcttcctactgtctgcgtaatggcgtcattgccgaatgtcagtacttcggagccgaaaatggcagacatcaacgggatgattaccaaccataccaggaatgagccggcacagataatggccgaatatttcaatccgatgatatagcccaaacccaacactgctgcaccagtattcaccttgaacacgacttttgccttgtcagccagcatctcgccgacaccgacgatgcgcgtgctgactgtctcgctccaccagccgaaagtcgcgatgatgaagtcgtacagacctccgaccagacccgcatagataagcggctttgcctggttgcctcccttctcgccggacaccaatacctgtgtggtggcagtcgcttccgggaatggatatttgccgtgcatgatcgatacgaaatatttccggaacgggatcaggagcaggataccgaggatgccgcccaggagcgaactcatgaatacttcgaagaaattgatcgtgatctctggatacttgtcctgcaagatgtaaagggcgggcagcgtaaatatggcgcctgccacgatcacgccgctgtttgccccgatggactggataatgacattttcgcccagcgcgtttttacgtttgaacccgctggataatccgactgctatgatcgcgatcgggatggcggcttcgaatacctgtccaactttcagtccgaggaaagccgctgccgcactgaacaggacggccatgacgagtccccagaatacggaccaaggggttacttcccgatactgtttgtcgggcgataggatgggtttatatacctcaccttctttcagttctctgtaggcgttttccggtagcccgctcaccttttcttcatcttctttcttcacggtgtttatatttagttagaattatcggatatatcatcgcaaagctacattatttcttggtaagaaacaagtgcattgtttatgaggaagtagctgccggtataggaacatttgacggtagaatttcatcttataagttgtccgcttggtggcggacgatcgtttgccattaagcggacaacttatgcaatatagagaaaaagccaatatataagggagattttacttatctttgcggtggaagaagataaacaaacgaatgaatcaaaaatatccatcagtcttattggaaaatgcagtgaacgaattgtcgtcattgccgggagtggggcggaaaacagcacttaggctggcgctccatatgcttcgccgtgatgtcggttacacggaagggtttgcgtccgcactgttggcacttcgtcgtgatgtcaaatattgtaaggtctgccataatatatgcgacgatgacgtgtgtgctatctgtgtcgactgccagcgtgatcattctacgatctgcgtggtcgagaatatcaaggaagtgatggcgatcgaaaacacggggcagttccgcggtgtttatcatgtcttgggcggtattatttcgccgatggacgggataggtccaggtgatttgcagatcgacagcttggtacagcgggttgccggaggagaagtgaaggaagtcgttctggcactcagtacgacgatggagggcgacacgacgaattttttcatctaccgcaagctttcttcctatgatgtgaagatatcggtcatcgcccgcggtgtctctattggcgacgaaatcgaatatgccgatgagataacgttggggcgttccatcgtgaaccgcaccagcttcaacgactccatcaaactataacagagttataatttaagatttacgcagcattgataaatcataaatccccatgaaactctcaattataattgttaactacaacgtaaaatattttctcgaacagtgtctctgttccgtgcgtgctgccatagcagggatggaggcggaagtactggttgtcgataatcattcggccgacggttcggtcgaatatcttcgcccgcgttttccggaagtcacttttatcgagaataaggataatccggggtttgccaaagcgaataaccaggcgatccggatcagtagcggagaatatgtccttctgctgaaccccgatactgtgataggcgaagaaagcgtgcgttctctttgtttctttatggacgaacacccggaggcgggaggaatcggggtgaagatgttggacgggcacggtgttttcttggcggagagtaaacggagttttccctctccttgggtgtctttttgcaagatattcggattgtcgaaattgtttccttcttcacgcctgtttgcccgttacagcctgccgtatttgaataaggagaagcagcataaggtcgaagttctggcgggcgctttcatgtttcttcgccgtaaggcgctagataaagtgggactgttggatgagtctttctttatgtatggcgaagatgtcgatctgtcttaccggatcgtgcagggaggctatgtgaattattatgttcctgaacgtatccttcattataaaggagagagcacgaagcatggcgatatcaaatatgtgaaagccttttatggggccatgctgatattctaccggaaatattatccgcattccggttggctgatgagcatgctcatccgtttggctgttctgttgaaagcatccctttccgttgccggcggtatgttggggttgaaacgaaaaccccgggcgaaacatcgtcgcctactggtgctttgtcgggaagaagagtttgaaaaggtgaaagcagcctgtgtgaaacggatgccagatctggaatatgtcaatctttggaatctgaatgaagagcgtgtgatggatgctatctgccgtcgcaatcagatgaagcgctttaccgatttggtattctgctacccggatgcccgtttcgagcagatgctcttattgatggacaaggtggccgataaaaggatcaactatcatatagttattaatggagaattgataattgacaattgaaaattgcgttgagcgatttcttattgttaattgtcaattgttaattgttaataaaaaatgaacttacttcaaaacaagacagtctgccttcgcgccccggaaccggaagatttggaattgctctattcgtgggaaaataatcccgaatggtgggagattgggaacacgttggcgccttattcccgctatctgttgaaagaatatatagcagaatctcaccggggtatatttgatttgaagcaattgcgcctgatgatcgacctttgttccacgggcgcaacggtcggtatgctggatttgtatgatttcgatccgcatcatcgcagggcgggagtcggcatactggtcgatccgctttaccagaagaacggactggcgacagaagcgttggagttattggccgaatatgctttttcttatttgaagttgcatcaactctttgtgcatatcccgatagataacgaacccagcaaagccctttttgcccgttgcggctttaccgtgacaggtatactgacagactggataacgactaaagatggttattcggacgtcttgacgatgcagaaaatcaatgagaggaatttgtgatttataatttattgtcgacatgtaaatcataaatctttagttcagcgagggttctttcgggtatttggtccacgtttcatattggcttccgagcgattcgagcgattttttccagaagtcttcaccttcggcaagtagcacattccggttggatgcatgacttacgacccatgaattttgatctatttcattgtgcagttgtccttcctgccacccggagtagcctaagaaaaatttcactttcccgtcgacagagtgtccgttctggatataatgtatcaatgcgctgaaatcgccgtcgaaatagaggtgatcgtttatcttaagggagttagggatgattagatctcctaaagaatgaatgaagaacaggcggttggcactgactggaccgcctaaatagatcggcatttccggaaatccctgtaaatcggcaaaaaaggtgttgactgatagctctgttttcttgtttaatacaaagcccatcgaaccctcctgagtatgttctaccaatagtacgacggaacgttggaagtaggcgtcttgtaaaaaaggttctgatatcaagatgcttccttgggccggaagcacgtcattatgagttatcttgaatatgttgttatacattgccatgacagaggatacttgctggttaataaaacagcgacaatatatagcttttggtttaaacaaacaaatgaaaagccgagctttcatgttaatgagtcataaataaaagcccggcctgtgttaattatgcggtgtgattctctttgaatagcttcaggcgctcttcgagcagggcatattgatgcggtttgataaaagatgtacaagcgcgtaggccttcttggttactacctgtcgtgcttaatgaaatggcgcttacaccgtaataaataagttcttccatcagttctcctcctgtcattcccggataggcgatcgtgaaataaaatccgtctgcgatcggttcgtctaggtcatggtcgtagacgatccggaaaccataatcggtaaagatcttttttaatctttctgctcggcgtccgtattcttttacttccgaaataaaatcgaacgttccgtctgccgcagctttgaacatggctgccaatgcgaactgcgccgaatggctcgtgccggacgacagggcatataatacgcggtgaatgtatacagttccgaacgttcctcctccgtagcgctgtgtcagtccgggataggctcggtgatacagtttgtcggagattgccgtgacgccgatgcgctggccggcatagctgaatgcttttgatcccgaaatctgcaaaatgtaattatccgtataacgggcaactgttgcctggaaaggtgcttcaaacggctttcccaacggtttccggaagtccatagcgaagtaggccaggtcttcgatcacgatcgtgtcatatttgtttgccatgtctccgatgatcttcagctcttcttccgtcaggcagaaccaggccggattgttggggttggagtagatcatggctgcgatgttgcctttggagaggtattgttccagtatgtcccggagtttttcgccccggtattcgtacacgtcgaacgattcgtatctatagcccatgactgtgatctgctgcttctggacagggaaccccggatcgataaagagaatcgtgtcctttcccggcgtacattgtccgcaaacgagaaacgatgcgtatgtcccctgcatggagccggttacgggaacacagccttccggcgcaatatcgatatcgataaatgctttgataaaacgagatgcttccgcttttacatcggatgtgccattgatattcggatagatagaggcgacgccatcttgaagagctttgatctcggcatcgacaccgacttgggctgctttcagtccgggaacacccatttccatatggataaattctgttttagtctcttgttcaagttgtgtggatatggcaacgacctcgcggatcgtcgctttcccgaaatcgggaagtccgtagccatctataatctttctggctgtctgataatctaccggagtattcttcatgattgttattatttatatgaaaggcaaaagtagaaaaataatctatccgacgtaaatttttgccgtgaaactattgcaagattcaaaataatatatacctttgcatcgcaatcgagagagattgcaggataaaagttatggttcggtagttcagttggttagaatacatgcctgtcacgcatggggtcgcgggttcgagtcccgtccggaccgccagaaacaaaagtctttggttcattgtgaatcaaaggcttttttattttaatccaaggggtcgagattctgttgaaaatgatttgcgcctgcccaaaaatgaaacctttcaggtgaaggatggaatgaaagttatgaggctatgaagtgagtataaaaacaaaaaagacctgaaagatttcctttcaagtctttttttgtgggcagtgatggattcgaaccaccgaaggcgaaagccagctgagttacagtcagccccatttggccactctggtaactgcccttttgagcctcttgtcggattcgaaccaacgaccccgagattacaaatcacgtgctctggccaactgagctaaagaggcattcattttttatcagtatcaatctttctcgattgcgggtgcaaaggtacgtattattttttaatatgcaatagtttgggagcataatgtgtaatatttttttctaaaaactctccgaactctgttcggaactcggagagggctttctgtttatgttgggatattgttattctttcttcaaaagtacctcatttatagcttttttgaagtcggccttccccattgccccttttgccatctgcggttgcccgttcattgggcagaaaaggagggagggaatacttctgataccgaaagaggcggccaatccctcttctttttccgtatctaccttataaatatcgatttttccggcatattcttctgctaattcttctaagataggagcgaccatcttacaaggtccgcaccaggtggcatagaaatccacgatacaaggtttgtctcctttgtacacccacttgttggggctggcttcgtagttcgctacttttttcagaaattccgtttttgtcaattcttgtactttcatgtttattctccttattaattgaggtttatattcttgtttattgattatataacaaaggtatgctatttattccattccgttattggacatttttcccttataattggaaatattactatattgcttgagttccagtcatattgtaaataaaaaagccgtccggtatgttgccgggcggcttttatctggagtttaaagagctttaatatcttttgccaacggtatcccaatcgatgattttccataaagcgttcaaatgatcgggacggcggttccggtaatccaaatagtaggcatgttcccacacatcgaatcccagaatcggtttcaatccgtgagcaaccggattgctaccgttagcttctttggtaattgagagttttccgtctttatctttagccagccatacccatcctgaaccgaataaaccggttcctgcagctacgaattctttctggaagttttcgaacgatccccaagtcgcgtcgatcgctttggcgagggtgccggtcggtctgccaccgccatagggggagaactgggtgaagtacaaattatgattaagcgtctgtccggcattgttaaagatagcaccgtcggattctgccacgatctgttctaatgtagcgttttcgaacttggttccctgaatgaggttgttcaggttatttacataagtctgtaaatgtttgccatgatggaactcaatcgtttctttacttataaccggttccagcgcgttggctgcatagggtaactggattaattcaaatttcataactttttcttttttatctgttatttgactattattactattatttgttatcaataataataaactgagacataatgtaagcataatcaatctgttttatgttgtttctactattctaacattccctgctcgaaatttgttcatagaatgaaatgcatattatttatcgcgggatagactttatctatgaacggaatgtactatcttcgccaaccaattaaaataaacacaataatgacaaaaattcaggaaacactggttgcgttgccagaggaaaagaaagctctgtttatcccggctttcggagatgtggacaagttttatacgaccgtttatctgattgcccgaaacgagcatgtgacggagctggaaaaaccggaccgttacgaagaccgcttgcaggtgatccgccagattcgtggcaaggtggagaagttggtgagttctttcgggttagacggctctgagatcgtggcagatatcgccagcgattattttgaagattacgtgaattataaggaaccggatatccggatggcgaatgaagagtttctcggtatcatacagaaggtagcgagggagtgagaagaattatgatggaagtgtgtcgaaacctccttgtccctgcacttgatgcggggccgcaaaaggacagaccttatcaatcagatttttatagggtcggttttaatgcgatcccacatcaagcgcgggaacaggatagtttcgacacactaccatcataattacttcttcagccgtttttccagcaatcgcatatagtagccgccgacgactgaacgggcctggaatccacgttgtgttccgtcggaagtgtaatgccagtcgctcaacgggacgcgtgaggtcgtttcgttggcgtatttccagaccggaagcatgaacgtttcaaaatcggccgtattgccggtcaggcaggcactccacagaatccagtcggatttggtataatcttcgcggttgtccagcggcagaccgtatttgttttgtctggtcttgtagtaagctgtttccgtttcagctatttccgaagggaatatattcagatctaacaagcggtcccaaaccaaattatatttctggctccatgtaccggacttatcgaaggtcagcttatagtgatccccgtcttttgccatcgcaatccatttgccagccatttcacgagctgtcgccagataagaatccgctatttccttcttccccaacatcccggccatcttgccgtagccggctatacccatgatcgccttgatggagaggttggtgttgtgggcgaaatgaccggcgaaatcgtccgtacataactggttgtccgggtcaagcccctcttttttcaggtaatcggcccaggttgtcaacacatcccaatgtttggctgcataatccgcatttccttcgattatcgcaatggctgtcgcgaggatcagcatattgccggattcttcgaccggcatatcgccgccgtaggtctgtccgttagcctgcggatacgtgccgacatcgtgtgaggggaaaggcttgttccatctgccactttcgctgtagtaaaagatcgggttcatcatccccttcaggagctcggggttatagcataagaacagcggcgccgaagggtaggtgatatcgaccgttccgatcgagccgttgctgaaattctctttcgacaggaatagcaagttgccttccttgtctgtcactaacttatgggcggaaatggcctgacgataggccagggcgcacagctcggcatatttttgtccgccggcggccgctgtttcctgcatcaggcgtccgtcgaagtccgcacaccgtttcatcattccggcatactctttctggcctttggcgaaggcatcgaaaatgtccgtctgcccgtcgtgcttccagtatgccatccggttgtcattgaaatactggatcgcatacagatcgtcatatccgatcaacaagtgccctgacacggtcttttcgtttaccttgcctaagttgtcggagtaggcgaggaccgtcatctgtttttccatatccggagacacattctctgccttgccggacagtttgccgtcggacatgaatgcttttttggcagcataatattcgtctatggcaactgtcacatccggggattgcgcggctgaaagatagaaatagccccagtcgatgcgaaggtcgtctcccttcttgcctaaaacttcctggtcgacagagccggtctttagatagacatacccgtctttttcgatcttttcgaaggtgacaggttgatctgtcgtgtttacagcccattgaggggtcgcttcgaggtataactggacttcgtgtgtccgaccatctaacgaacgggcctgatacgtgatataattgtacggggcggtcatggcctccagatcgtccatcagcatcggagcagtgaagatcaaatccagttcgacagggccgcattcgaacgtatagtacgtctgtgtcggcatgacggtggtcgccgtctggaccgctttattgtcaaacgtgtctccccgttttaccttcttcatgatgcccatgtccacgtatgcacctcctccgttgttgcggcagtgggcagccaggatgttccccgtcggtttgagcgtgttggccacttcctgcgggatttccttcagcaggtcgtaatccaacccgttgccggttacggccacctgcttaccgttgatgtacaactcgatgttgtcgtcgtgcgaatatagcaggaacagatcttccttatccgtcccctcaggccagtcgaacgagcggcgtacccagatgtcgccgtcttgccagggagtggagcgatacggattatcgtctgtcccgaatgccgccttgcctgttttccagccttttgtctcgtaatcgacggcggtccattctccctccggcagctcgaatgtgtaggtcgcctcccataagccggaagccgccgtaccgataaccggcgtcacctctactttgtccgctcccatgaaccggtatgaaacaccgtctacacgcaggcttcccaatagcgggaagttacggccggtccagtggcgcacgctttcttcgttcaggcggtcggcaaacgaccaggcgctggtgtacgggtcgatcgttaccagcggtgttgccggcgcccgtaattcgtttttggcagcaggggcatatacttcgtttgcgatacgcgtgttcgacgaacaagcactcagcaaagtgaccgtacaagccgatagcagcatgatttgtcttttcattttgtctttaccttaattattattgatgattttaaataatctttccctttttcggttgcccgaaattaaaaataaaaagcgatagtcggaagcaacaaagttctgctaccggcatattgcaagattattgaaagcatttgcatgatttttaaaatatcaaaatgtcattacgaccccatgtaaatcggattagtaccccatatatttggaattactatagcgggtgatattttttaacgtttctatttaaactggggagtggctgttttgctgacgaaatgatatcgggcaaggcagacattgttttcatgggcggagtagaacctcgcctctacgggagaccttgaaataactttttttgtgcttcttctgtatgtgtatgtgatggataacgtttatttttgtcggttacagcagtgctgttgtggaatagtgataagaatagttgataaaattaggctttttaggcaaaaatcgatgaggtactttactaatattttgcgttggatatcttcacaggaacacttatatttcttgttcggcttgcttttcatcattccgaactgtgtttttctgttcacagagcctttacctgttccggtgggccttgcttctatcgtcatgccgttggcgttctggatgggagttctgctgctggcgcgtaaacccggagtggtggtctggtgtctgttgccgaaaatcatactggacggaggccagttggtcctgttgtatcttttcggcgagtcggtgatagccgtggacatgttcctgaacctgacaagttcgaatgcttccgaagcaagcgaattattaggaaatatttttcttgtcatcgtttgcgtctttttcttttatacgcttcctaccttgtggctggccacgcgttcaatccgcatgaaagacaggctgaccgccgtgttccgcaagcggtgggcgtccagaagcttggggcttttcggagtgggggtgctgctctgtttcctgccttcttggcaaaagcacagtttctcgctcaagaacgatgtttatccggtcaatgcgctttataatctctattttgcgattaccaaatcgaacaaaaacgccaactattccatctcttctgccgatttcaggttcaactcggtccggacgggacaggcggatggcaagcgcgagatttacgtgcttgtggtgggagagacttcgcgggctatggaatggagcttgtatggatatgaacgcaatacgactccgcgtatggaaggactcgatggtctggtacattttacggatgttgtgacgcaatccaacaatacgcacaaaagtgttccgatcatcctgtctgccgctagtgcggaaaactatggcgtgatatatgacgagaaaagcatcgttaccgctttcaaggaagcaggtttccgtacgcttgtcattgccaatcagaaactgactacttcgatgatcggggctttctaccgggaggctgatacgtttatcgatatgagcacgttcaacaccggatcgtatctgacctcattgtatgatgccgcccttttgccgtatttggaaaaggaactggataaatcggacgaggatatgtttatcgtcctccatacatacgggtcgcatttcaattatcatgagcgttatccggctgagttccggatttatacgccggataaggccgaaggcatccgccaatcctataagaaggaactgcgtaatgcttacgacaattcgatccgttatacggattatgttttgggagaaatcgtcgacatgttgaaaaagaaggaggtttgtgcgtcgatgctttatctgagcgatcacggagaagatattttcgatgatgcacgtgctcgttacctgcatgcttcgcctataccgacttattatcagctccatatcccgtatatcatctggttctcgaacgattatcggaccgtttttccggagaaataccggacggcgatctctcacggggcttatccggtcagcacgaacagtgtgttccatacggtattggatattgccagtgtccggacttcggtatccgattccacactggccctgaccaacccagcttttgccgttcgtgaccgtatgtttctcggtgatcacgacgaacctgtcccgttctggaaggttggattgaagaaagcggatttcgttatgttggacaaatggaaaatagcttataggaaagactaatgagcgcacagaatggacatattacaagtaaagtcatattgggatacctgttattgatcctgatagccgtgtgttcggtcgtttatatttataacattatcgaacagtttgctggcgaagacgacccgaacaacaaatcgagggagaaggtttatctcgtgaccaacactctgtcgttactctacgaaagcgaagcgctcggacaaatggtcgggtttccacagggggaaatcaagcatttcaaccgcacgctgaacaaggctttgcagaatatggattccttgcgtacattagtgtcgaatcccgcactatatcccaagatcgacacgatcgatatgttgatcgagcagaagcgttggaacacgcgccgcctgttggaaacctggcgtgagacgaacgcggaacatctgtatacccaaaacatcgagaaggtgatcgcccggcaagatacgatgatccggcaggtcgaaatacaggagcgcgtgatcgtgcaccaggattccgtgaaaactcctcagccccataagcaccgtggctttttccgccggctcgccgatgcattctcaccgcctaaagaggattcgactgttatcgtgaatacgacccggcagatcgtgactgatacgttggtgaattccttcaacccggcagacacgatcgtgacggtcctgaaaaatttgcaggacagtgtggccgatcagcgtaaacagcttgtcgaccagcttttagagcgtgccgctaacttgcgttataataatagcatcatcacgagccgaatcaaccagatgttgcgcgatatagaagaagaggagatgaacgcgtcgatggagcgtgttgtgaagaaacaggaggtgctgcgcgaaacctcttatctcattggcggcatcgctatcctgtcgctgattatcgtggtggtctttatcattctgatcacgcgtgatatctccaggagccagtattatcggctgcaattggagaaagccaagcaatatgctgaagacctgctccatagccgggagaagttgatgctgacgatcagccacgatatccgtgcgccgctctcgtccataatcggttatatagaactgctgctgcgccgtcgtccggacgaaaggcaacgttattatttggaaaatatgactggatcggccaatcatatcctttctctggtgaacggtttgcttgattttcatcgattggaatcggggcagatggagatacagaacgtgcctttcagcgtacgtacgctttttaatgaaatatacgggagcttccgcccgatagccgaggcgaaaggacttgcttttgttctgaatatgaaggaggaagggatggatcgcatctattcaggtgatccgatacgcctccgccagatagtcagcaacctattgtctaacgctgtcaagtttactcatgaaggtcgtatcgttttgatagtcaaattgtcaattctcaattctcaattgacaattactgtctccgactccggtgtcgggattccggaagaagaacaggaaaaaattttcggcgagtttgcccgtctgtcgggaaccgaaaaggaagaaggtttcggtctcggactttccatcacccgcaagctgattgaactgatgggaggaaccttgtcgctaaagagtgttccgggaaaaggaagtgattttacgattgtcctgcctttgcgggaatcggaagtgcagacgttgcatgccacgcctgccatagaggaggaagacgaaacggagaccgggagcttcgaagggcgcgaaatcttttgtttgctggtcgatgacgatccgttgcagctggcactgacggaagagtttttgaaacggaaccatgtggaggtcaccagttgttcaaatccgtttgccgtggtcgatattttgcgtaatagttctttcgacgcgatcataaccgatatacagatgccgggcatggatgggtacggcctgcttaacgtcattcgttcgtcgggtgtccccggtacagatactgtgcctgtcatcgcgctttcagccagtgtggaaaacgagaatacacattatttggaagtcggtttcaccggattcctaaataagcctttcacggctaagcagttgatcgctttgttgaataacctgttgcaagcggatatacaagccgaggtgtcgcctgaattcaattttgattcgcttactgcttttgccggcgaagacaaagaagcttccgcttccattatccggacttttgccgaggagacgaacaagagcgtttcgttgctacaacaagctttggagaagaccgaccgtgcacaggctgccaaaatctcccataagctaatcccgcttttcaccatgttgggagcttccgatttggtagcccaactgagaatccttgagaagaatgacgaggcactgacagacgaaggttggaagcggcttttatttgaagtgatccggcaggcgggtgttgttgtgggccaggctgtggaacggtatctgtagaaaaattccccatatatgtccacaattccccattcgtgacgttgtaataaatagcttcagtaaaacattctgggcgacttctctgttagaatagaagagtttacaaaaacaggctgtgtgtcaggctgagtttggcacgatattcgcttcttttatagcaagaagcggaagtggacgtttctacattaaaaaaccgttttaaagtatgttcgagtatctattttaagtctgcaaacaaaaagagcgcctaaatggtgctttttttgttttatatgacttctttatctacttttgtcttttgtaaaatcataaattaaaaatctaaatcattatcaatggagcatggacttttggctaagtcgcctcgtatcgaggtggtggatgcattacgcggttttgccgttatggctattatgttactacacaacatcgaacattttaatttttatgacttcccgacagcttcttcggcttttatggaggcgatggataaaggaatatgggaaacattgtttttcctcttttccgggaaagcttacgcgattttctccctgctgttcggattcagcttttttattcaatataacaatcaggcggagaaaggtaaagacttccgtctgcgtttcctgtggcggcttttccttttgttcattatcggctgtttcaacggggcgtttttccccggcgacatattagtcctttattctataattggcgtggtgctcgtgttagtctgcagatggagcgaccgagcgatcctcattgccgctattatcctgatgctccagcctctcgaactcggcaagtttttctatgcgatgataaatcctgactatgtgccggcagccggcgtttggcgtgttcatagccaacgtatgtatccgttcctttcgcagccggatttctgggcgatggtcaagtccaacctttggaacggccagttgttcagcctgttgtgggcatgggggtacggacgttttttccagactgcctctttgttcctgttgggtatgctgatgggacgcagacagttgtttgccaacctgtccgaacatcgggttttctggatgcggacgctggttatcggtgcggtttgctttgtcccgttgtatttcattacggcttcccttccggatatgatctccaacaaggcgatgctgactccgatgaacacggtggtttcctctttccgcaatttctctttcatgtgtgtgttggtcgcttgttttgtcttcctgtggcaacaagtttcgacccatgaaatgctgcacggtttggtgccgtatggaaagatgagtttaactaactatttgacacagtctattataggatcgtttatctatttcggttacggtttgtcactttataatgttttaggtacgacagccagctttggagtcggcgtcctgttgttcatcctccagttaggtttctgccattggtggttgaagaaattcaagcaaggtccgttcgagggggcgtggaaaaaggcaacttgggcattttgaattgacaatggacaattgataattgcggcaagcggtatttaattgtccattgtccattgtcaattatcaattcttagttatctttgtgtacgaaacaaaaaagaataatatgccgtctatcctgattttagaagatgatataacattctcgttgatgctgaaaacctggctgggaaggaaaggcttcgaagtcagttcggtatcatcggtttcggatgcacgaagccggatagaggatgcctctttcgatttgatcttgtctgatttgcgtttgccggacggggatggaatcgatctgttgaaatggataaaagaaaataattttgtaattcccctgattatgatgaccagctatgcggagatacaaaccgccgtgcaagccatcaagttaggagcgtccgattatattgccaaaccgttgaacccggaagaacttttaggcaaaatcaaggatgtgataaagacggaaacaggttcggttgcttctgccaccgaactggaacgctctgcgcgttcagccaaacgtcccgaaccgtcgggaggaacgcgtagccagtatgtggagggacagagccaagctgcccaccagctctacgagcatgtacgtctggttgctccgacagatatgtctgtgttgattaccggttcgagcggtacagggaaagagtatgttgctcgccgtattcatgaacagagcaatcgtaagaaagccccttttattgctgttgactgcggagcgatcccgaaagacttggccgcatccgaatttttcgggcatgtgaaaggttcgtttaccggagctatcgataataaagaaggtgcttttgttgccgcccaaggtggtacgatttttttggatgagatcggtaacttgtcctatgaggtacaggtacagcttcttcgtgccttgcaggagcggaaagtaaaaccgatcggtagcaatcaggagatcgcgatcaatgtccgtcttgtctccgcgacaaacgagaacttgcgttctgcgattgataagggagatttccgtgaagatttatatcatcgtatcaacgagtttaccgtccgtatccctgatctgaaggagcggaaagaagaccttttgctgtttgccaacaacttcctggatcaagccaatatagaattgcagaaagatattattggctttgataatgacgtgatccggattttccagtcttattcgtggccgggtaacttgcgtcagatgaagaacgtcatcaagtatgctaccctgttagcgaccggtcgctatattacccctaacgagcttccagaagaactggctaccgacccgatttccgctccggtcaatatccagttgaaaaacgaatcgcacgaatgcgaaatgatcaaacgtgccctgcaagaagccggtaacaataagaccagagcagcccaactgttgggtattgaccgcaaaacgctttataataagttgaaagcgtatgggattgcttgatctttttacaagatagggggcttggtttctattaaataaatatgatttcttttgtttttatggaaaaatgtctatatttgctgcaatcatacacttaatttcgagtgttgattttaaattgttacgatatgttcgttaaatcttatagacgactattcaattgcctgatttcttgacaggtgttcttcccttttctcttttaccgttttcgggtaagagctctttcggtttgcattagtatctgaagtcattggcttgggtcggtggttttatctctgcatcattttgtccggaatttatcagattaaaataattgaataaaaatagccttttatataatatgactataatcacagctcagcgtgcaccgcacagtgcatctaatttcgcccccacagtagaggcaaatgcctatggaatgaatgaccggatcaaacgtcttcgacaagagacgttcgaagccgagccctccctgtctattgaacgcgctttgatagaaactcgtttctacaaggaaaactacggaaaatatccgattccgattcttcgggccatgaatttttatgagatctgcaagcagaagacgatctatatcggcaaggatgaactgatcgtgggcgaacgcggaccaaaaccgaaatgtgtaccgacttttccggaactgacctgccatagtgtggaggacctgcatgtcttgaacacacgtgaattgcagcgttatacgatcagccaggaagacattgacacgtatgaacgcgaagtgattccttactggaaagggcgtacccaacgagaacgtatcttcagccatgtgcctcaggagtggaaggaggcctatgaggtggggatgtttaccgaatttatggaacaacgtgctccgggacatactgctttggacggaaaggtgtataagtacggactgctggatttgaaagaacgtatccggaaagaactggacgggctcgatttcatgaacgatcccgaagcaaccgacaagcaggaggagttgactgccatgtccatctcgtgcgacgccgccatcctatttgccgaacgacatgcggatctcgccgatgaaatgtcgctgacggaaaaagacccgaaacgggcggccgagttgcgccgtattgccgaagtttgccgccaggttccggcacatgctccccgagactattgggaggcgatccagatgtattggttcgtccacttaggaacgatcaccgaactgaacggttgggacgcgatgaatcccggccatttcgaccagcatctggctccgttctacgaaaaggggattgccgacggtacgttgacacgcgacgaggcaaaagaattgatgtcctgtttcttcatcaaagtgaacaaccacacggctcctcccaaagtcggcatcacggctaaggaaagcggtacgtataatgattttacgaacctgaatatcggcggtgtaaaagccgatggcagcgacggggtgagcgaggtttcctatatcatgctcgaaacgatcgaagaactgcatatcctgcaacccggcagtgctatccatatcagtgcccgtacgccggaacgtttcctgcgtgccggctgcaaggtgatccgccaggggcatggctatccgtctgttttcaatccggatgtgtatatccaggagttgatgcgccagggaaaatcgttgcaggatgcacgcgaaggcgggtgcagcggttgtatcgaggtcggggcgttcggcaaggaggcgtatgtgctgaccggttacctgaatgtgccgaagatcttggaggtgacgctccacaacggtgtcgatccggtttccggacgtaaggtcggactggaaacgggtgatccgcgcggtttcggcaattatgacgaactatatgccgcttttatgaagcagatccgttactttgtggatatgaaggtgcgtgtcagcaactatatcgaccgtatgtttgccaagtatgcaccggccaccttcctgtctctcttcatcgacgattgcatagcgaaaggacgggattattacaactgcggtccgcgctataatacgacctatatccagtgtacggggctcggtacgattaccgacagcctggtgacgctgaaaaaacatatattcgaagataaacgctggtcgatggacgaattgctgaaagcgatggctgataatttcgaaggagccgaggcgatgagacagacgatcctgaaccgcacgccattcttcggaaacgatgacgaatatgccgacagtattgctgtgaaggtgttcgacgatctctatgatacgatcgaaggaaagccgaatacgaaaggcgaatgtttccatctgaatatgctgtctaccacctgtcacgtatattttggcaaggtgatgggggcgactcctaacggacgcttggccgggcgtgccatctcggacggcacgtctccgtctcatggtgccgatacgcacgggccgtctgccgtcatcaagtcgctcggcaagcttgaccaggtgaagagcggggggacattgctgaaccagcgtttcttgccgagcctgttgaagcgtgaggaggatatctccaagttgtcttcgttgatccgcagctatttcgctttgggcggacatcacatccagttcaatatcgtcgatacggagacgctttatgctgcccagaaatgtccggaagattatcgcgaccttctggtccgcgtagccggttacagcgattatttcaatgacatgaacgccgatctgcaggcggacgtgatcatgcggacggaacaggaaacgttttagcaattgaaaaaagatgtttgttttcgatataaaacgatatgccatcaacgacgggccgggtattcggattacgatttttatgaaaggatgccccttgtcgtgcgtatggtgtcataatccggaaggaatctccagccggaagcaaaaactctatacgaaaaagaaatgcattggttgtcggacgtgtgtcgaggcttgtcctgagcaggcattgacactcacatcggaagggatcgtgacggacggggcgcgttgtaccctgtgcggaatctgtgccgaggtgtgtccggctatggcgatggagatatcgggcacggagtattcggctgaagccttgatgaaggagattgagaaggagatcgttttcatggatcgttcggagggaggtgtgacgttttgcggaggagagccgttgttgcatcccggaccgttactggacttgttacgccgttgcggggaacgggggatacatcgggctgtcgatacgacgctgttcgcccggccggagatcgtacgcgacgtgatggataattgcgagcttctccttgtcgatttgaagcagatggattcggccaagcatgcgaaatattgcggtgtcccgaacgaattgatcctgtccaatctccggatggttgcagaagccagacacgatttctatcttcgtattcccttgatcgaaggcgtgaatgccgatgaagaaaatataacacgcagtgccgctttcctggcttcgttgccgtgggagcaccggattgtgaacctgctcccgtatcatgacatcggcaagagcaaacacgagaagttaggtacggtctacaatccggatcgatatgctttcgccgccccttcggacgagacactcggacgttgccgggagatattcgcctgctacgggatcgaaacgacgatcgggggataattgaaggtcttttatttcctctgtcactgtatcactgattcctttttatcaattgatattcagcttgttttatttgtgatatatgcctgttttctctatcactaccctatcactggcaattcagataaataataggtgctttgcttgtatatatctgtatataagtatattataaatgatataaacgataaacatcctattcccatccctacaaatcactcgattattttatgtaaaaacggctataaaataggtaaaaccgggtggttttcattgctcggcaaggtactttagttgccggacacccccatgttgccatcctttacatccgggtgtaccggctccctacacccggatgtaaaggatggcaacatgggggtgtttacggaattatgtgcttgtttcataaacaaaaatgccatgtttcagaagtgatagaggagtgatacaggaaaacgtcctgtatcactcctctaacgcttgaatgttaatagctacaaccttcttagtgatagaggatttgtagaaaacttcgtatgaagatcacaaccttggaaaattttgatgcggttgtcctaaaagatggataatatgttttgatataccaactataaatttaactccggtttcagtcggtttaacacaacaactctttcgtctgccgtgtttcattatcaattttattaacgccaaaaaaatagatatatggaatggtttgccaatttgctccggcattacccggagcttgctatctttctcacgctggctttcggcttctggatcggtaaattcaagattaaaaagttcacgttaggaacggtaaccagcgtcttgctggtcggtgtattgatcggacaattgcatatcgatatcggagctccgttgaaatcggtattttttctgatgttcttgtttgccgtagggtatagtgtcggtccgcaattcttccgaggattgaaaaaagagggattgccacaggtattgtttgccgtcgtgatgtgcctgttctgcctgttggccccgtttgtgctggcaaagatcatgggctattctgccggagaggcagccggtctgttggcaggttcgcagacgatatcagccgtactcggtgtggctgaagatacgattaaccaattaggaataccggtggcagataaaacggatatgatcaatgtcatgccggtagcctatgccgtctcttatattttcggtacggctggttccgcttggatcatgagtgatattgctccccgtctgttgggagggatcgaatcggtcaagaaagcctgtcgcgaactggaagccaaaatgggttcggacgacgaaagcgagcaacccggcttcatgcctgccgcccgtccgatcacgttccgcgcctacaagattaacaatggctggttcggcgcgggaaagaccgtgaaagagctggaagattatttggagggacaaggaagacgccttttcgtcgaacgggtccgtatcgatggtgtgattcgggatgcgaaatccgaccaaatgcttttgaaaggaaacgaagtcgtgctcagcggacgtcgtgaatttgtgatcggagaggaggactggatcggcgatgaagtaaatgatatcgaattgttggactttccggccgaaaccctgcccgtattgatctcccgcaaagaatatgcaggcatgacagtcgctaaactacgcaaattaccagttatgcacggtgtcagcatcaagagcatcaaacgtgctggtatcaacattccggttttagccgcgacgacgatcgatcccggcgacatgttggagttggttggtacaaaattggaggtgaatgcggctgccgatacattaggctatgccgaccgcccgacgaaccagacggatatgattttcgtcggcctcggaatttttctcggaggtgtcgtgggggccttggcgatccatttcggaggtgttcccatcagcttgagtacgagtggcggggcgttgatcgccggattggtcttcggctggttgcgttccaagcatccgactttcggacgaattccggaaccatccctttgggtgttgaacaacgtcgggttgaacatgttcatcgccgttgtcggcattacggccggaccgagctttgtcaccggcttgaaggaggtcggcgtcagcctcttcttcatcggtgcgttggctaccgctatcccattgatcgtcggtgtgctgttgggaagatatgtctttaagttccacccggccattacgttgggctgtacatccggagcgcgtacgaccacagcagctttgggtgctgtggaggatgccgttgagagccagacacccgcattaggctatacggtgacatacgcggtcggtaataccctgttgatcatttggggagtcgtgatcgtcctcttgatgacctgaagggtattggaagtattgtttttatatactcattatattcaattaagttatttctctatgacacacaaaatcactcgtgaatacgaaaagaaaatgtcagaaatcagtcctttcgaactgaaaaatatcctgatagaccttgcggacgaaagcgcccgtaagagtacgcatatcatgctgaacgcagggcgtggcaatccgaactggatcagtactgtaccccgcgaagcctttttcctgctcggccagttcggactggaagaatgcgcccgttcctccgaatatggcgaggaaatgatcggactggccggtatccccgaaaagaaacgtatcgctacccgtttcacgcaattcctgatgaagcacgccggctctcccggcatggcactgctgaaagacacctacgattatcttgtgaatgagaaaggagtcgatgagaacgacctcgtacacgaatgggcggaaggcgtcatcggagaccagtatcccgttcccgaccgcatcctgaaatatacggaagtattggtcgaagactacctgaagcaggaattgtgcgacaaccgcccgcccaaagggaagttcgatctctttgctaccgaagggggaaccgccgcgatgtgctatatattcgattctctgcaacaaaatttccttcttggtaaaggtgacaagatcgtcctgttcgccccggtattcactccttatatagagataccggaacaagcccgctacttgttcgatgtaaccgaaatccatgcttgtaaaatgacaaaagacggctatcatacctggcagtacaaggaagaagacctggacattctgaaagacccttctgtcaaggccgcctttatcgtcaatccgagcaatccgccttcgtacggtttgacagatggtttgatgaaacgtattgtagatatcgtacgcaatgacaatccgaacctgatgatcattaccgatgatgtctatgcgacctacattccccatttccgttcgatcatggcggaattgccggagaacaccctctgcgtctattccttctccaaatatttcggagcgacaggctggcgcctggccgttgtcgcgttgcacgaagagaatatatacgaccggatgctgaaggaattgccggcagagcggaaagagcagttgaacgaacgctatagcagtatttcgctctatccagaggaaatccgtttcatcgaccgtatggttgccgacagccgtcaggtcgccttgaaccataccgccggtctttcgctgccgcaacagacgcaaatggcgctctttgcctccttctccctgctggatcgcgagaatgcttataaggcgaagatgcagcagatcattcacgaccgccttcatacgctttgggaaagcaccggtttcacattgctcgacgatccgttgcgtgccggctactatagcgagattgatatgttggtctgggcgaagaagttttacggagatgatttcgttgtctacttacaggaaaattacgagccggtagacgtcgtgttccgcctggcacaagaaacttcactggtattgctcaacggtggcggattcgatgcaccagagtggtccatccgctgttcgctagccaatctgaaacgtgaagattatgtccgtatcggggaaggaatcgcttccattttgcacagctatgcggataaatggaaagaatcgttgaaggaataaacaaagcctttgaacaaaacgggctcccgctacgttctattattgaacgtatagggagcccgttctcatagataccctttatcagtcgatagaaattattgaataaaaggtatttatataaatactatttttattccatcctacattgctaactaataaaaagaatagatatggtgtacgacattgacatgctgagaagcttttattctaatttcccgaagcgggtggatgcagcccgcgaacaggttggccgtccgttgaccctggctgaaaaaatattatatgcacatttgtatgaagaatcggacatctgtcctttccgccgtggtgaagattatgtgaatttccgtcctgaccgtgtcgcgatgcaggatgcgaccgcgcagatggcgttgcttcagttcatgaatgcaggaaaatccaaatcggccgttcctgccaccgtgcactgcgatcacctgatccaagcgaatatgggagctaagacggatatcgcaacggctacgcagagcaacagcgaagtctatgatttcctaaaatccgtttccgacaagtacggtatcggtttctggaaaccgggagccggcattatccatcaggtagtgcttgagaactatgcttttcccggcggtatgatgattggtacggactcgcatacgccaaatgcgggtggtctggggatgattgccatcggtgtaggcggcgctgacgcagtggatgtgatgacaggtatggaatgggagttgaaaatgccgaaactgataggtgtaaaactgactggtagcctgagcggatgggcatctccgaaggacgtgatcttgaaactggcaggaatcctcactgtgaagggtgggacgaatgccatcatcgaatatttcggtcccggtgccgcatccttgtctgcgacggggaaagcgacgatctgtaatatgggagccgaggtgggtgccacgacttcccttttcccgttcgatctgaacatggccacttatttgcgtgctacgggacgtgatgatgtggccgagtgggcaacagccgtttccgactatttggaagccgatatggacgtgcaggctcaaccggattctttttatgaccgtgtgattgtaatcaatttgtccgaattggaaccgcatatcaatggcccgttcacgccggatgcggcaacgcctatttccgaatttgctaccaaagtgaaggagaatggttggccccgcaagatggaagttggactgatcggttcttgtacgaactcgtcctaccaagatttgagccgtgccgcttcaattgcccgccaggcagccgaagacaagataccggtggcagctccgctgattatcaaccccggctccgaacagatacgctatacggccgaacgggacggtatcctcggagatttcgagcaaattggcgcgacagttatggccaacgcctgcggtccgtgtatcgggcaatggaaacggcataccgacgacaatacgcgcaaaaactccatcgttacctcctttaaccgtaatttcgccaaacgagcagacggcaacccgaacacgcatgcctttgttgcttccccggaactgacgctcgcgctgaccatcgccggagacctttgtttcaacccgctgaccgatacactgaaaaccgccgacggccgcgaagtgaaactgaaagaaccggaaggcaccgacttcccgccgaaaggattcgaagtgaaagacaacgggtatgttgccccgacggggaaggacgccgaagtggtaatcaatcccggctccaaccgtttacaggtcttgaagcctttcgccgcttgggacggcaaagagctgatcgaaatgccgctgttgctgaaggctgaaggcaaatgtacgaccgaccatatctcgatggctggtccgtggcttcgcttccgcggccatttggagaatatttcggacaatatgctgatgggggctgtgaatgctttcaacggcaagacaaacagcgtgctgaaccagctgaacggcaagtatgaggctgtgtcagccgtcgccaaacagtataaggcaaagggaatttcatctatcgtcgtagcagaagaaaattatggtgagggatcgtctcgcgaacatgccgctatggagcctcgtttcctgaatgtaaaggtgatccttgccaaaagcttcgcccgcatccatgaaacgaacctgaaaaagcagggtatgcttgccctcacttttgccgataaggatgattataagaaagtacgcgaggaagacaagatttcgattgtcggcttgaaagagttcgcccccggaaagccgctgacggcaatcctttaccatgccgacggcacagaagaatcgttcgcggtgaatcatacctataatgagttgcagataaaatggtttaaagcgggagcagcgttgaatgcagcccgatgataaattattgatttatgggcgaattaaaactgtcctgttcccgcacttgacgcgggaacaaggctgttaaatcatcatttgtaaaaataaagaataagattatgaataagataacaaaacaaaacgggatcctccttgtccccgataaagtcgtcattccctttatagagggagatggagtaggtgcggagattacaccagtttgccagcgtattgtcgatgaagcggtaggcagggcgtatggcggccagcgagtgatcgaatggaaggaagtattggcaggcgaaaaagccttcaagcagatcggcagttggttgcccgacgagacgatggaggctttccgcgaatatatgatcgggatcaaaggcccgctgacaacgcctatcggcggtggcatccgttcgttgaacgttgctcttaggcagacccttgacctctatgtctgcctccgtccggtacgttggttccgtggagttgtgacacctgtcaaagagccggaaaaagtcgatatgtatatcttccgcgagaatactgaagatatctatgccggcatcgaatggcagcaagggacgcccgaagctcgcaaattcctcaagttcctgacggaagagatgggtgtgacgaaggtgcgttttcccgaaacttcctccttcggcgtgaaacccgtttcggtcgaaggtacggaacgtctcgttcgcgctgccatcgaatttgctttggccaaccgcttgcccagtgtcacgttggtgcataagggaaacatcatgaagtttacggaaggcggcttcaaactgtggggatatgcgttggccgaacgcgaattccccgataagacttttacgtggccccagtatgagaagatcaaaaaggaaaaaggagaggatgccgccgctaccgctttgttggatgccgaagctgccggaaaggtcgtcatcaaagatgtgattgccgacgccttccttcagaacaccctccttgtgccggaagaatattcggtgattgccacgctgaatctcaatggtgattatgtctccgaccagttggcggctatggttggcggtatcggtatcgcaccgggagccaacatcaactacgacagcggctatgcgatcttcgaagcgacacatgggacggcacctaacatcgccggcaaaaacgtcgtgaatccctgctcgcttttgctctcttccgtcatgatgctcgaatatatgggatggaatgaggccggccggctgataaccgccgcactcgaacacgctttctccgaagggaaggccacccgtgacctggcccgcttcatgccgaacggacagcctctcggcactaaggagtttggagaatatatcatgtcggtcttgtaacggcataggagttgaataaattaaaatttactgtcatgaaaaaagaatatatcatttataaattgtccgatgcatccaaagaagcatgcaagattgacaacgaactgttcccaatgtataatgtgaagcgcgggcttcgtaacgaagacggtacaggagtgctggtcggactgacgaaagtcggtaatgtggtgggttacgagcgtctgcctgaaggcggactgaaagcgatccctggaaaactgttttaccgcggatacgatgtggaagacatcgcacacgggttgatcaaggagaaacgtttcggtttcgaagaggtcgcttacctgcttttgtccggtaaattgccagataaagaagaactggcaggtttcaaggaactgatctgcgacaatatgccgctcgaacagaagacgaagatgaacatcctggatctggagggacagaacatcatgaacatcctggcccgtagcgtcttagaaatgtacacgttcgatccgaaccccgatgatacctctcgcgacaacttgatgcgccagtcgatcgagctgatctcacgtttcccgaccatcatcgcctatgcttataacatttaccgacatagccagcaaggtcgttcgctgcatatccgccacccgcatgaaaatctttcgatcgccgaaaacttccttcatatgctgaaaaaagattttaccgatctggaagctcgtacgcttgacttactgcttgttctccaggccgaacatggaggaggtaacaactcgacgttcacagtccgcgtgaccagctcgaccggtacggatacctattcttccatagccgccggtatcggttcgctgaaaggtccgttgcacgggggagccaatatccaggtggttgatatgttccatcatctgaaagaaaacatagccgactggaaaaatgtagacgagatagatacctatttcatgcggatgctgaacaaggaagcctataacaagaccggcctgatctacggtatcggacacgctgtctatacgatttccgatccccgcgccgtcgtcttgaaagaactggcacgtgatctcgcgaaagaaaaagggcgtgaagaggaatttgctttcctcgaattgctcgaatcacgtgccatcgagtgtttcgccaagcataaagggacgaagaaacgcgtttcctcgaacgttgatttctattccggtttcgtgtatgaaatgatcggattgccgcaggaaatctatacacctctgttcgcgatggcacgtatcgtcggatggaccgcccaccgcatcgaagagttgaacttcgatggcaagcgcatcatccgtccggcctacaagaacgtcctcgaagagcagtcgtatctccctattgcagaccgctaataccggttgggcctgcgaactccgcaattcccctgattatgataatgaccccgacagcccattttccatgcggcagtcggggtttgctgtttttccgtcttgtcgtccgagtggctgtcctctttttgcaggacggttctggtgatgttttcgcggaacaacttatcacgataggtgatattgaatttaatttcttttgaacctcctgtacagtgttccatctggtgatttccggattagttgctttcaaaagaaagtcggatacaaatgtctgtttttttaaatcgggaaggcgagattatggaataagccattatctttgcacctgatttagaaaaaatgatgaactatgacacttccggaagatccgatgatgcttttcagcttcatcaatatgaaattacgtgataattattcttctcttgatgaactgtgtgacgatatgcatcttcaaaaagagatgcttgtccagaaactgaagagtgcaggattcgagtatagccaagagaataacaagttttggtaatcgatggaaggagatgacgtccatttgaaaagttgacttgtctccatatgccatggcagcgatgaaaagcgaagaaaaagatgacctgttattctgaaaaagtaaattgttgtttgcaaggctgccgatagaagattgttgattgtgattttggtgcagttgccctgaagtcctgctgtatagtgtaagatttattcgtatatttgctatcattgtaataaaaataaaaaagatatgaaaacaagattgatgatgtttgtggcggttatcgccttgtttgtttttaatggttgcagcgattccaaagaatcgtatgtgaaagatttcaagaagtttatcgaaaaggtggaagcagccggaagcgattatacagaagaagactggaagaaagccgatgaaaagttcgaaacttttactggtgaccgttatgagaagttcagttccgaactgacaatagatgagcagatagagattaccaaactgaaagcaacctatgtaacccgtagaggactttcgaatttgaagaacggagttgacaagctcctcgacagcgatatacttaaaatggaaaagaacaaaaaatagcgtttatagagtctgataccatgaaacttaaattatccattttagctctttttatcctggttgccatatcggtgaagggggcagttgtcgatacgttggccgtttacagtgaggcgatgaaaaagaatgtccaagtcgttgtcgtttctccggagaataatcatgtgccgaaaccggttgtctacctgttgcacggatatggaggaaatgcgaaaacctggctttccatgaagccggagttgaaagatattgcagatcgcgacggcctgatctttgtctgtcccgatggcaagaatagttggtattgggacagcccgaaagatccgtcctaccgttatgagacattcgtttcctccgaattagtcaaatatatcgattctgaatattcgacagtgaaagatcgttccggtcgtgctattactgggttgagcatgggcggacacggagccatgtggctatcttttcgtcataaggatgtgtttggtgcggccggtagtacgagtggcggagtcgatatccgaccgttccccaataattgggagatgaacaagctgctcggaaacgagagcgacaatcaggaggtttggaacactcatacggcaatcatgcaaattgaccgtatcaagaacggtgaactggctattatcttcgattgcggttacagcgatttctttttcgaagtgaataacgacttccataagaagctgctgaaatataagatcgaccatgatttccttgttcgtcctggatcacataacggtgaatactggaagaactcgatcgactaccaaatcctgttctttaagaaatttttcgataaaaacaagggaaagaattaggctggtatagcctagtatcaaaacaccggtgattcgttttcaaaacaccggtgttttgcatatatagggatatggtggcttgtcttttagctcaacccttcaatcacgccgtccacgatgtcgatacgttttgcctgcgggtctttcggcagtcccggcatgcgcatgatctcgcccatgatgacaacgatcatctctgcaccgttgttgatgatgatatcgcgcactttcaactcgaaattcttggctaccccgtaggctttcggatcggaagagaacgaatactgcgtcttggcgatgcagatcggatagtgggagattccgagactttcgatctgcttgattttcttgtccgccaatgtcgtatagacaacagaggctgctccatagatctgttcggacaccttttttatcttgctacggataggttcgtcgtcctcgtagatgtattttagcggggtggaaggtttcttttcgatcgtgtcgaccaccagtttcgcgagttcggcacctccttcgccaccggcagcaaatacgttgttcatacagaaaccaacaccgatctcgcggcaatgttctgcgaccagtgcgatttcctcgtccgtatcggatgcgtacctgttgaaagtcacgatcacttcctggccgaagcgtttcatgttctcgacatgtttgtccagattctcgaaaccgtttttcatcccttcgatattctgttccttgatcttgttttccggtacgcctccatgcagcttcaagctctgggctgtcgccacgataactgtcagtttcggtgtcagtccggctttgcggcatttgatgtcgaagaacttttcagctcctaggtcggcaccgaagccagcctctgtaatgacgtaatcgccatacgtcagcgccatcttggtcgccagaacggagttgcagccgtgtgcgatgttggcgaatgggcctccgtgtacgaatgcggccgtgttttcggttgtttgcaccaggttgggcaggagagcgtctttcagcaataccgtgatcgctccggccacaccgagatcgtttacagtgaaaggcttgtcatcgttcgtatatcccaacaggatgttgccgatacggcgtttcaagtcttcgatgtccgttgccaggcaaaggatcgccatgatttccgaagcgggtgtgatgtcaaaacctgtctccgtcggtacaccgttggccgatccgcccaagccggaaacaatgttgcgcaggctgcggtcgttcacgtctagtacgcgtttccatttgatttctttcagaccttcacaggtattacgcgtctggtagatgtaattgtccagcaatgccgtgatcatattgtgggcagaagtaaccgcatggaaatcccccgtaaaatgcaggttgatgttttccatcggcaacacctgcgagtatccgcctccggcagctccgcccttcatgccgaagcatggacccaatgatggttcgcgcaaggcaacgaccgcctttttaccgattttgttcaatcctaaagccagcccgattgaaacggtcgtcttaccgatacccgctttcgtaggagtgatggctgtaaccaggataagattgtgttgtctgatcttctcttcgtcgatcagatggataggtatcttggcgatgtatctgccgtaattctgaacttcttcacgagggatacctaatccggtcgcgatttcttttatcttgcgcagagaaacctctcttgcaatttctatgtctgatttcatgtcttatgtgagtttaagtggaaaacaaaagtaaatatatttttgtataataacaaaatgaaaagtcaggtagtttagatactattggatgatcataagggaaaagtatgggaatattttcctctggatttgtttccggtcggaggtgtaaaactcttctccggtcccgacattctcaaaataatggaagttcgtttccggatgcaaccggatgcaggtatggacggcctccacacattgggacagcttcatgatgacgatcacattaccggtcttgatctttttcgacaattcttccgccgtcagcattccgggtatgacgatgatttgttcttcctgcttgacaatatgcaagccggctaaagcacccgctgcaatgaaagctggtattccggcggttcgttccacttcgatgcggttctctttgaatttgtcgtatatatactgtatggaagaatagaaccctgcatcgccttccgccacaatgaccacctttttctctttatccctggcggatatggccttttcatacaaggtatcgtagactttccagacttcggtccggtctttgctcatcgggagcgtgaagaactggactacagatttctcgatttccagttcttcgataatacgggccgcacgggagagtagttgtccgcttttgcttatggtggcggggcaatagatgatatcggcctgtcggagttttttcaagcctttcaaggtgatcaattcggggtctcccggaccgagcgatacgaagcagatggggtacgacatgtgcgttagaattatttggtgcgcaaaagtgaggaaaattgcggaactttccaaatctgcattccacaattgtggggataatttccacactgccttttccatagcccgctttttattctttggcatgcaatttgtacttgatggaacgattagaaaaaggtaaatagattgtttaagattttaggttatgaagaagtttgtattgatggtggctatggtggtttcgtgtgtctgtatggctcaaaacagtcatgcgcagactggacgggatgggaatacggatatcgatatgttgagtatgaaaaatttctatgcgatcgatatcgtcgatgtggaccttgccgcacaggaagcgatttacaacgcttatgaaaattgcttgatcaaagaggtgtacaagtcgaatggtagcggcagccctatccagtataaggtctctctcgagacgactgaccagcggaatctggttgtcgctttcgacgaaagcggccatgtgctgaaagtcatgccggaagacgaatatctggcggttcgtaagaaaaactgatttgtctgccacttttctcttgaaagaaaaagtaatattattatatttgccctttgaaacaggtttccctgtcctccttacaggacagggatgaaaagggaaccgggtgggaatcccggacagaccacgctgctgtgaaacttcggtaacataccggcaatactcaatgccactgatcgggggatcgggaaggtgtccggggatggaagtaagtcagaagacctgccgtttcggttttgaagagtctcgtcctcgtggggtggacaacgctcgctcggttataataaaataatattgaatatgaaaaaatgcctggcagggtgctgcctgcttatgtcgttgtgtgtcgcatcctcgtgtacgatcaaaaacaatcaatggaccgataaggtggaaacgacggaagaaagcgcgttttccggtgtccatattgtacccgagtatgcccgtggtttcgaattatcctatcggagcgggtatgtcttgctggatatccaggacccgcagaatgaggaaagtacgacttttcattatgcgcttgtcaggagaggaacgaaaccggccggcatccctggatcgtatactgtgatcgagacacccatcagaagtgttatctgtatgacatctttgcagttgtccaattttatcgagatgggcgaactggacaaggtcgtaggggtgaccagtacccggcatctgttcaatagggagatgaacgaacgtctcaagagtgggaagaccgccaaaatcggcatagaagggaatttcgacaacgaggtgatcatgagtatgaacccagacctgatccttgtttcgccttttaaacggggcggatatgagaccttgaaggatgtcggtatcccattgatcccacatttaggctataaggagatgacgccgttgggacaggcggaatgggtgaagttcgtcggcctgttggtgggacaggagcaaaaggcaaacgagatattcgacgccatcgcggcccgttacaatgaattgaaggagctgacggcggagggaaaagtgaagaaacgtccagttgtgttgagcggcgagatgcggggcggtaactggtatgccgtaggaggggagagctttctcgcccaacttttcaaggacgccggtgctgactatttcctcaaaaacgacaaacgttcgggaggtgtgacacttgatttcgaaactgtctacaaccagggtgacgaagccgattactggcgcattgtgaacagctatccgggtacgttcagctatgaggcattgaaggagcaggacccgcgttatgccgatttccgtgccttcagagagaaagggatcatctattgcaacatgaaagatacgcctttttacgaaagtatgccgaccgagccggaagtcgtactggccgacctgctgcatatattccatccggacctgctgcccgatcatacacctgtttattatgcacggctcaaataggctgcacgaatgagacattccactacttttctgatgtcgctcatcgtagcgtctatcctggtcctgatgttcctgaatttggtgttagggtcggtgtctatcccgttgaagtctgtctggaacattatttgcggactgggagacgagccggtgacctggcagaatatcgtctggaaatcacgtcttccgcaggcattgactgctttggtggcgggagcgggcctggcgataagcggcttgcagatgcagactgttttccggaatccactggcgggaccttccgtgctggggatcagctccggtgcgagcatgggtgtggcctttgtggtactgctgagcggtagcctcggaggggttgcgcttagtaaattggggtttatgggagaaattgcgctttcgatagcagccgtgatcggttcgctctcggtgatggcgttaatcgtatatgtgtcgcagaaggtgaaggggaacgtgacgctgctgattatcggcgtgatgatcggctacgtggcgaatgcggtgatcggcgtgctgaagtttttcagcgtggaggaggatattcgcgcctatgtgatctgggggttaggcagcttctcacgtgtttccggcaaccagatgatgctgtttgttgcgatcatggcgattctgatccctttgtcgttcctgttgatcaagacgttgaacctgatgctgcttggcgacggctatgcccgtaacttgggattgaacatcaagcgggcacgtcttttggtgatcacctcggcaggagtgctgacggcgatcgtgacggcctattgtggaccggtcatctttcttggcctggccgtcccgcacctgtgccgggccatttttcaaacatccgaccatagggtcctgatgcctgccgtcctgtttgccggtgccgcattggcactcgtctgcaacttgattgcccggatgcccggcttcgaaggggctttgccggtcaattcggtgactgccctaatcggtgctccggtagtggcctccgttctattccgtaaacgtaaaaacgaactgaacgaatgatgagacaagatacgattcatataaacgatctctctatcggttatcggacaaagaatgataccaagttggtggcgagccatatacaggcccggatttatagtggagaattaacctgcctcttaggagcgaacggagtcgggaagtcgacgcttctgcgcacgctgtcggctttccagccgaagctgggaggcgagatcgccgtcttgggacgtgatatggacagttattcggacaaggaactgagcacgacgatcggtgtggtcctgacggagaagtgtgacatccggaatatgtccgtgcgggaattggtcgagatgggacgcagtccctacaccggtttttggggacggttggacaaggaggacaagcaggtcgtggaagaatcgatcgccttggtacggattgagaacctggcctcccgcatggtgcacaccctgtcggacggagaacggcagaaggtcatgatcgccaaggcactggctcaggaaacacctgttatctttctggacgagccgactgctttcctcgattttccgagcaaggtggagatcatgcaattgctccaccatctgacgcgaagcacgaacaagacgattttcctctccacgcacgatctcgaactggcgctccagatcgccgacaagatttggctgatggaccggacgaacgggattacgcctggtacgcccgaagacctcgccctgagcggccacttgagcggtttcttcgcccgcaagggaatcgtgttcgacacggagaccggcttgttccgcatcgataaccggtattcgaaagaaatacgcctgatcgggcatggacagaaatatgcgatggtccgcaaggcactccagcggaacggtatacgtgccgatcggcatgtggagtcgcctgtatggatcgagacgggcgatctgtctgtcggttccgcattcctgatccaccatcttgacggacgtacgctggcggccgataccatagaatctctcttgcaggagctttctgtttgacaaaaaagcctaaaaggaaaaacttttcccacttcatttgttatttctatcaaagaagaataatagagtcctcggagaagcaattggtaaattatcctatactttccgtaactcggataaaattaaatgatatgagaaagtatttcctttatgcttgcctgttgttcgctggcgtgtttaccgcttgcgataacgatgattcggacgggatcgacccctcgatccctttttatcagaatttgggtgtcgaatataatgttacgcagaaccatacccatataggcgcaaatttcaataaatataacagcgaaggggccaatctgcgcctgccggccaaaggtattctctttaacggaaaagtgccggactttttaggaatgggagcttatatgtatatgctgtcggaatccgggctggacccggtcacgttcaccttttcccgttggaaagaccaggtctatacaaacaaggcctctatcgacgatgtcgatccaatcgctcttcccgaatccctgacatccgtcaaaggcaatggcgcaaccattatcacttgggtaggaaagccgatcgggaaggacgagtatgtccaggtgcacctgacctacagcggcggtgtttatgatatcaacaatacgcaggaaggcgcgacctccatcacgctaaactttacgaatccgacttctgccaccaaaggaaccctgttcttgagccgtgtcagagaacttcctttacaggagagcaacggtgatgcgggaggaaaaatcgatgtctcctacgtgcagaacaaggatgttacatttgaataatcacgcttgaaaggttattttcccactttccgaaatcagcagaacggatagtttcccgttgggaagcaagggggtacaatgctctcggcatttctgtaacagaagtgggaagaaactttgttgttcggtcttgctgaacagttcccatagttctctggccagcgtcagggaatctattttttgtacggactctggtttgcaacccgcctttgcagccaattctttcagaaaggctttgttcatgacgacctttttgctgtgcgtatccagtgctccttccgctagtttgacggctttgccaatcatgattcccatgacgacttcgtcaaattgcagttcggcagctattttcagtgtctttccgatgaagttcccgtagtgcacaaacatttgcggaggaagttcttccgacagccgttccgacaggtagcctttcaggaaacgttcgcttttcgctcctgagttgatgacgaggcgagaacatcttattgcttttgcaacttcggcttctttccggatcgaggcgagaaaggcatcgttcgagaaagggcgtacgatgccggatgtcccgatgatcgagattccgccgatgattcccaacttcggattgaatgtccgggcagctaactctttccctcccggaacggagatcgtgacgaccacctcctttatcttgccggacaggccgttttcctccagtattgttgtcaattctccagtaatcaggcggcggggagtggcgttgatggctggtcctccaatttcgaggccgaggccgggaagcgtcaccgttcctactccttcaccagcccggaacaggaaggcgggggtaggggattgcccagcctgtaactcgatacgggcgataacggaacagccgtttgtcacgtccggatcgtcgccggagtcctttataaccgtgcatagggcggcgttgtccgcccattcggtagcggcgacagggagcatgatcttttccccggaagggagcgtgatgcaactaacggtttgttccgttcggttcaggagggcgactaaggcggctttggcggcagccgtagcacatgtgccggtcgtgaaaccgctccggagcgggaagaagccgggagcgaggcgttcgatggctttacgaagtccttccatgccttgcacaaaagtgaaactgtcaggtaggggagggcgttgtatgacataaacgggaatgccgcaggcttgtgctgcttcgaccttttccttgaaatatccgctttccccactttcctttgttagtacggcatctggatgaagctggtccagcagcttcttctcgtcttctccttcatggaaaaaaataatccgttcctttgggaatccgtcggattcagccagtgaaagcgactctttccggttcaggatacggaaccagcagggcgtctgctcccagtaaggacgcagtttcgcaatggtcttgacgcctgtcagggccaacaggttgcagatcccgtccgcacgcaggcggtcgatggcggcggcataatccgtgcaccatatcaaccgcttgtcatgtgcggggtattgcctttccaaccggacgaccggaatccgaagacgggaggaaacctttgcaagcgtccgatgcaaccggatggcgaaagggtgggcggcatcgactagcaacgagatttttttctcgcggcagaattgtgccatcttttcttcgtccataccaccggtgaggcggatggcatgaacggcttctatcgcctgttcgttgccgaccgtcgagtagtagtagggtttgccagcgctctcgatgacttgtacggccttgcggccttcggttgttcctcctaagatcagtatcataatgcttctgttgttctcttgtctttaccggtaatatcgcaggggggcatcctctctggtgagtacttgcctggcagctatgaggtttcatgcctgatagctatgaggttccatacctcctacttatgaggtatcatgcctcataggtaggaggtggcccctcgctaacggcggtacagatgcttgaactcctcggcgtagagacgtgatacccccgtacggttgtctatggcatcaccgacgactaacaaggtcgtcagtgtcagattgttttcttttacgatctgttccaggtctttcaattcgcctcggtagatgcgttcgtctttccaggtcaacttgtagcaggcggctaccggtgtcgttggtgggtaatgttccagaagttctttctggacttgtccggcaatgccggcgctcaggaagatgcacattgtgctttggctggcggctagtttatgcagctgctctttctccggcatgggggtacgtccttcgccacgcgtcaggatgatggtttgcaccttttcaggaatagtgaactgggaacggagagctgcagcagcagcttggaacgaggagattcccggtgtgatatggtaactcatgccatagcggtcgaagaatgccatctgttcttgtatcgccccatagatgcaggggtcacctgtgtgcaagcgtacgatgaacttccctttgtcatagaacttttttataagggcgaattgttcttccaggttcatgtcggcagaactgcgaatcgtcgatcctttcttggcgcatagggtgagttctttggggacgaggcttccggcatagaggatcaggtctgcattttccagcatccgccggccccggatggagatcagttctggatcgcccggtccggctccgacaatttcgatatgtccatgtccctgtttccctttttgctgactatcttcttcgtcctgtattgccgatttgctgatggctatcgcataagtgaagtctttcgtctgccccttttgttttcccaccaataatgggcctccttccgcactcaggatggccgctgcctccgcgacgcttcccgacccggtggctttctttactgtggaagaaggatggggtacggggactttgtccagtacctctgccggataggtcttgaacgggctgcgcaggtaggtgtctgccagttcctttaatatcggttcttctttctttaggtcgatggaggagacgttggctatgctcttcaggttgaacctgtagaaaatggagcagatatacaggtccgtgaggacggacttcatgtctgtcaatccctttttacatccgatacctaagtgaagcactttcgggaagaatgataggcaggggataggggatttgtggtagtaagtgggactgaccgtgatcagcagctcgtatttttcgaggtcgatatctttatatttataaaagacatcgacgtgcgggggacaggtttccttcatatagtccgtctccttcgtgcgaatatcgagcaggagggcggtcggtcgacagttgacgaaacgggcgacacattcgttcatggccttttccctcgatgcattgaacgtttcctcgtctatcttctcgaaatcggtttggaagaaactgattatgccttcttgtgggttgtagacatcctgttcccagccatattgtttcgcgaaggtgtccagtgcccaaagtccctggttgtcactctgtgtcgtgacaaccgcttcggcgtccagtatgcgggccaattcatgtgtcagttcgttcgccccaccgatatgaccggatagtaccgatacgacatatttgccggtactgtcgaggcagatgactgccgggtccgtgtacttgctcttgatgtagggagcgatactccgtacgcagatacccatcgccccgataaacacaatcgtttccgatttatcgaaaagattgccagtcagctctttgaaagaggtgactggttcgatgtcgttatctgcttctctacaatagatgacagttttgcccggatattcgtcccggattttgcgtgctaacgacagactacttgccgaaaccacaagaatgttcagtgtatttttagacataatttttacccgttgcgcaaaggattgtaataggattattggaatcgagcgtaatgtttatttctgaatgtagtttcagaccgttttctgcaaccgcctcccggaacagcttgctgctttcttctgaaacggagttaaaaacgatcttgccgttcagactgttcaaatgggaagctaccttgcggatgatttctttcagcttgccaccatgaccgccgataaagactgcatcgacaatcgtgttcttttcgattgacagattgaggaagttaccaatacgcaggtctatgcctggagcgctgtgcagccgtgtgtttgcccggatgatgttctcgcactctttccgcacttcaaaagcttggatatctagatgaggatactggcgccgcgcttcgattgaaaccgagccggtacaggcgccgatatcccagaagtagcggctgttatgcagttctaacaggcttaggtctatcactcgtatcggtgctttggtaatcatttttgtccggtcattcagcaagataaatttcgtgtcaggtatgcctaaggctggtcgttgtaatgcgcagttcggagccttcattagcagaacacagttcggattggtgaaactcatttcgctgatttcctcgatcgagtagattttatagattttctctttcttcgggttgcctaaatgttcggctacccacatggtgtaatccctgtccaaatgatattccatcatcctcttggctatagccctgggcgtatggacacggtcggttagcacaccgatcagcggtcggtattccagcaacgcccggtcgagttcgtgccatggtcgtccggtaacggacacggcgtgcatgttctcatacggaatttgttcatggtgtgcgaacatctgcaatgagttgaagtagggaaacactttcatgcctactcctaaaaggtttttccggatggtggaagcgaagccgaaaaagaacgggtctcccgaaacgaaggagacgatcactttgccttcctggatcaaccggctgtattccgcaaggacggcatttattggagccttgatttcgatccataccgcatcggcgggtaggaatggtttcacaatttcgtaatgccgcttccctccggagaagatgttgtcgtgtttgacatttttgataatgacatctatatgcttaggctgtggattgtcgtccatcccgatcatatagatgtgcgttttgtcgtaagcttctacaatttcttgagttctcatacgtctctacctggttttaattgttttgcatcattgtagcataaaatcgcatttaccaaagtcgcggcgaggttgctaccgcctttccgtccttcgatgatgagtttaggaatagagacaaacggctttaccatgtgtttggattcctgtacgtgtacgaaaccgacaggagcggcaataatgccggcgggaatggctttccctttccttatcaggtcacaaagttccattaatgcggtcggcgcattgccgaatacatataaagcgctgggatgttcctgtacggcaagccggatgccagcttgtgtgcgggtgatccctttttctgttgcaagttgtacggtgcgctcgtcttgcaaatagcatttcacctcgatccccatacgctgcaaagctcctttgcggatgccggaagcagccattgtgacgtctgtgatgatggtgcgcacctccccccggctgaattttccgtaaagggaagccaccgcgtgatcgtcgatccgtaggatattttccatatcgaaatcggctgtcgtgtggatggcatggagcaaagcccatttcttgtcgagcggtatttctttgttcttgagttctttctcgatggtgcgaaagctgcggatcatgatgtcctggccgatcccgacatctgttttcatcttgatctctccgtaatagccgcgtggtgtgatgaatttaccgtcggcctcatatgactgcgagttcccgatcaggatgacagtgaacatgtcgacctgctcagggtcgaactctgccagcgtggtcaggttgacgacctgctcttcgcgtccggcctgacggacatagccgaccggtgtttcgggtacacgttcttcgaggaacagctccttgagacgatgcaactgccagtagcgcccttcgcttttcggattgtagatggctgtcacgaagtcgccgatagcggcggcccgtatgcgtttttcgatccgtagccagggagtcatcaggtcggagagggagatgatacagagatcatgcccgataggtgcccccagaagcgaagccgccttttggaacgcactgataccgggcactacctcgatctccacttgcggcgcctctttcatcgtccgcatttcatatatcaacggggccatcccgtagattccggcatcaccagaactgatcactgtcactgttttaccttccgaagcgtatttgtaggcctcttcggcacgtattttctcgcgcttcatcccagtatcgatacattgggtatccgggtgaattatatcctgtataaactggaaataatagttatatccgatgatcacatccgactgcctgatggctgataatgccgcaggcgttatgtcatcgcgatttcccggtccaatgccgacaacagtaattttccctttgttcatatgagctgtttgtaaattaacagaaaacaaaggtacgatttatttatttagttttcctctgcgggttgatataaatatcgtttaatactccgtttcggtgtcttttcgaattcttcctgataaagcttgaagcaagatactttgctgtaggcgggcatttcagtgttcagttggtcgatgttctgctgcatcagctcttcgatttcggagtgttggatgcctgccttgtccacttgttcccagtccggatagatcagggcgaccagtttacctccctgagaaatgatcaacgactccgccacgtacagcatattgtttaggcggtcttcgatctcttcgggatagatattctgtccgttggagcttaggatcatacttttgcttcgtccgcggatgtaaaggaaaccgtctttgtcaagtgttcccaagtcacctgtccgtagccagccgtcgggtagcatcacagcctttgttgcctctggattcttgtagtagcctaacatcacgttcatgccgcgaaccaggatttcgcctacttcgttttccggatcgttcgagtcgatccggatttccatgcggtcaacgacacgacccaccgagccttgcttgaacgtgtcccactgttcgtaggaaaccagtgggccgcattccgtcatcccatagccaaccgtataacggaagtcgatggatttgagaaacgtctctacctctttattgatggctgcaccaccaatcacgatttcgccgaagttcccaccgaaagaggcttccagcttttgggcgatcttctcgcgtaccttttggtcgatgtatggcactttcaacagcaatttgatcaatggcttttccagttcgggaaagaccttgttcttgatgatcttctcgataatgagtggcacggcaaggatcagcgccggtcgaatcgtcgcaaatgcctctgcgatgatttttggactcggcgtgcgtgtcaggaaatgaacgtggcagcctttgttgacggagttcagcacttcgaacgctaacccgtacatgtgcgccatcggtaacatacagacaatgttgtctcctggatgtatgaaaggaagacggtcgtaggcgaactgtgtgttgctccacaaactgcggtaggggatcatgactcctttcgagaagctggtcgtgccggacgtatagttcaagacagccaattcctccgggtcttcgatatgatatttcacatcgttggcggtgaaagaacggggatatttcttgccaaaatattcgttgatgcgatcgcgtatggtgcgtacctccttatttttgcaatcgataatggagaagttgtccagcatcatgaatagcttgacatccggcatcatcttttcgttcatgttctcccagttgctggagcctgccagtacggcttttgctcccgaatggttgacgatgtgatggatattgtcgggtttgaactcatgcaggatcggcacggcaacagctccgtaagccaatattccgaaaaagcagattgcccagttggaggagttgcgtccgacgatggccactttgtcgcctttcttgataccggcatgttccagtaggatgtgaaacttttctatccgccgtgcgacgtctttgaaatggaaggtatgtccattgtaatcggagaaggcggggaggtcccaatgctcctttatgcttctctctataaggtccaagaaacgattatccatagtgatataatttaaaaaagaaccggaatatccgtgagaatgttgcaaagatagcaaagaaacgatatgtttttatggaaacccaagaaacacctttccaaaacatatatgatttgaatgcaaaacacctatgctttgaatgcaaaacataggtgttttaaaataagtatagttgtttaccacggagtgattgtcacgttacggaattgtacttccttgccttcgctttgcagtccgatgtaaccttcctttaccttgtttgtcccggtgttctggtaaacgccgttaatatagaccgtgatgacaccgttttttacgaagatattagcttcattccattcaccggcaggcttctcgctgtcttgattcgccttctggattttcgggaaagaggggcggggttggcctggcttattctggtattcagtcagatccgaaccgccgagcaggacgaaatcaccggcattatcaagcatcaggttgcattcgataccgttcggaaacgggtttttcggctcttcaattagcaggaagataccgctgttcgccttttccttgccgtttggccagcgatattctacatgcagtttataatctccgtatttttctttcgtgtacatgtatccgaatggctgtcctgtgatgttgatgacaccgtctttcacggaatatacctgttcggttgggacggagttcttatcgacaacgaagttccagccggaaaggtcttttccgttgaacagcttggttgttttctgtgcactcgcgtcacttccgaaacacaaaaaggcggcagctactactgccatcgataacattctttttttcatggtcttataatattaattatttatacgattaatcaacaataagtttacggtaacggacacgttttggttccacgtcgcccaataatttgcgcttgtactcttcatactccgaataggaaccttcgtagaacacgacatttgaatccccttcgaacgaaaggatatgcgtacagatacggtcgaggaaccaacggtcgtgagaaacgacgaccgcacaaccggcgaagttctccaatccttcttcgagtgcccggagtgtgttcacatcaatatcgttggtcggttcgtcgagcagcaacacattcgcctcggccttcagcgttagagccagatgcaggcgattccgttcaccaccggagagtacgccgcaaagtttttcctggtcggctcccgcaaaattgaatttggagaggtaagcgcgggagttgacttccttgccgcctacgcggatgaactcctgtccgccggaaacaacctgataaacggtcttcttcgggtcgatatctttatgtgtctggtctgcataaccgacctttaccgtttcgcccacttcaaaagaacctttgtcgatactttccattcccatgatcatcttgaacagtgtagtcttacctgctccgttcggaccgatcacgccgacgattccgttcggcggcaacatgaaatttaggtcatcaaacaacagtttgtcgccaaatgcttttgctacatgctgggcctcgatcaccttgttccctaagcgcggaccgttcgggataaagatttccagtttggcttcgcgttctttctggtcttcgttcaaaagggcttcatacgaattcagacgggccttaccttttgcctgacgagctttcggggccatgttgatccattctagttcgcgttccagtgtcttacggcgtttacttgcttgtttctcctcctgtgccatacgtttagtcttttgatccagccaagaagagtagtttcctttccagggaataccttctccgcgatccagttccagaatccatccggccacatggtcgaggaagtaacggtcgtgcgtgatgcagataaccgtacccgtatattgttgtagatgttgctccaaccagtcgatcgactcagcatccaagtggttggtcggttcgtccagcaacaggatgtccggctgttgtaacagcaaacggcagagagctacacggcggcgttcgcctcccgacagcgtatcgaccacctgatcttcaggaggacagcgtaaagcgtccatcgctctttctaggcggctgtcgaggttccatgcatcagttgcatctatcttatcttgtaattcggcctgccggttgatcagtgcgtccattttgtctggatcttcgagtatttcgggatcgccgaatttttcgtttacttcttcatattctttgagggtgtccacaatattttgtacgccttcctgtacgacttcctttactgttttgcccggttccagtttcggttcctgctctagatatccgacggaatatccgggtgagaatactacttctccttggtattctttttcgacgccggcaataatttttagcaatgtagatttaccagaaccattcaaaccaatgatcccgatctttgctccatagaaaaaggacaggtaaatatttttcaatacttgtttttgaggcggaaagactttactcacgcctaccatcgagaaaataattttcttgtcgtctgccatgtttcaaattgtgtgtatttatatgatcatttttcttcgtggacaaacttacataaatatcttcatagtttatatatgtccggatgaaaatagcgtgtatttttatctttcttgcgttccttcgtctgcaatcttaaggggcatgattacttgttatgtatcggcttactgcaaaacgcaaatgcatatcctccccccagagtgtctccaaaaaacgttttcaaagggattattaagtaattttcctgtctcaaaacgctttttctttccggcatatttttctcggaggataactcgtcatttacagtcgttttcatcaattgcttatccataagagtttccaaagttttaccgatgacatcgaaacgcaaagcgatagaatttgttacccgtatcatgggattcagttgttcttcctcatagtgacggatgaatcggataatatcatcctgtcccttatttattttcgccagttccgattttacggatttaggggcttcggatgggttgatatgtaccttatctatatatctgaacgccaactttacaactttctctttttctgggaatagcgtttgcatatcttctctaccaaagctaccgtttccttgtctatggaaatggtagtgaatatcgtttttcgactgctgtttggcacggtaattacttttttatagaaatatgaacagatcaatacctgataataagcattgaaaaggaaatgcttattacaggtgtcattatagcgtgttcttgtaacacgctaaatcgataggtgaagcaaactgatttgctttttcgaactgtttgtaggtttgagaatcggcctattcacgaacaaaagcccggatatcgctggctttataatacgtttttcgcccgatagcgttgagcgttgtagggttctgaaagatgctttcaacagaaaggctaagtcttgattatccaacagcctttcgttttcatcgaatacagtatcagtattaataagagatttcaagtcttgcccgatctcggtgagtttcttggatagcttctccatccacttctcgaagttttcgttgtctatatacattttacttcaatttttagttcaacattattgttttcaatcgattgatgaagcaaagttttacaaaacaaggttgcaaaaaaagaggagtaggtaactactccccgaaaaatggtttataaactgctataaataaacgatttgcaaaattatcttttctaatctttatttgttcttgcgtttacggtcttctctggtaatagtatttcgcaaagcgtccaaagttttagtaagattgtacggtttacgagtaaacactttaccgatcttatcgtagatactaccaaatttcagattgaaaagctgctcaaagccacgagccaactgaatttttgggactggcgttccattttccccaacgatttttcccagtagaaacagagctagtacaatttcagcaatacctataatccccaattctttagactttgggagtacatataggtctgacttgaactcggtagacacaggtgaattaaactgttcgggatgggtagttttcagattgagtaactctaattctgcaccaattaaggataatgctttatgaatgtatagatttttaagcgtatttcccccccagcccatcctgatacaaccctttaaaggggctatctcaatacgggtgagattaagcatccggaagacatgagtatagtcttccgaatggctaattgttactatttgcttcacaaaatcttcataagcatcttgcatttctgtgttaataacttcttgtgaggtatcagccagtaagatgaaaaaaactcgttctcaataaatcattcataggcataaaatttaattgtgaataaattatatatatcaaagcactagctttgtatgctgaatgattttttgttttgtttgtagttcctctgctaatcagaatgattcaaggggtattcagccttattggtcgcaattccagaaatggtgaacttcaaattcctgcttcttacaaatataatccactggcatgagttctaaaatagcgaaatgtagctatatagaagaactgaaacttgcatcaatccttgtcaatcgtttctttatatagttcataatctatatttcttcatggcaagtaattcatctagtttaccctctgcaatatatggcaaacactgatgtatcttatcggtagaccaatcccaccatttctgtattagcagttgttcgattacctctgcatcgaagcgttttcgtatttctttggcaggagttccacccacaatcgtataaggcggaacatctttggtcactacggcacgtgcggcaataatagcaccgtcaccgatatgaacccctgccataatcacagcttcgtagccgattcatacgtcattgccgattacaatattgcctttgttgtcccatgcagtagtaatattcgacttttccaattcccattcttcatagaatagagggaaggtataggtagacagagatttcaatgtatgattcgcacaattaaacagaaacttcgtgccacaggcaatagaacagaacttgccaatgattaacttctcccgatggatgggataatgataaagcacattgttcttctcaaacagcaagggatcagctataaagtcattgtaaatagtataatcacctacctcaatttgtggatctttaatcacggcattcagatagactgtttgctgatctccggtgcgaggatatatttttgtcatcataacttgattcgctttaatagtgtttactttttagatgaatgatagattgaagtgccagcagaatcacaaacaggtattctgccgtcaagtagagggataaagatgcttttatacagaagctcaaccaatagaggtacactaaatacacacaggtggttgttacctgaaacagaaaggtgattttggttttccccgttcctccgaccgcattgagatatacataaccgggtagtgcaaacgtgtaattcaatagcatcaccacgaaaggagcaaatgctaattctatcaatagctcattatcggtgtagaaactgacaatccaacggttacagagtaaagctactactacgaatgggatgccaacggcataacctaatttcagaaccttgtggcagatcgggaaaagttcatttctcgccctggctccaatagcattacttactaatgaacttgtagtgacagcaaaggaattggcaattacgaaaaatattgctgatacgcttcgggttatattggaaatagccaactctgttttccctaaatgttcgattgccacgaaaaatagaaaccaaggagctacgctgataaaagcatggagcatactccacacagacagattcaggactttgataagtaactgtccatcatacacgggcttcaatccgtatttttctttgtcaatcttcgcttttgtgtagagacaaagcataatcaaagaacccatttctgctaaagatgaagcgatggctgctcccgaaatacctaattccagtgtgaatattaagaagtaattcagcgggatattaatcgccaccgcagtaacagccgaccacgataaggctttcgtgtgcgttattccaacgaagaaagaccggatagccagaaaaggaaatgagaacaacagcccgaagctgcgccagtctaaatagcggactaccgcttgataaatctccggcgaggaaattaatcgtttcaatagataaggagaaacggcatgaatcaataggcaaagcaaaacggctaatcccgataaaaagaatagcccctgaaagaaagtctttccggttgccttataattcagctccccgtttcttcgggcaatcattacttgcaatccgatgctaaacccaaagcccaacatatagactgccagataataaattccggcaatagcggatgctcccaactccacctcgcctacgtgacctaaaaagacagcatccgttatattgattaactgctccattaagatgctcatcattaccggaaagttgataagccagatttgtttatatgtataattcattgctcaactgcaaaatagcacgacacgagcagactgcatcatatagtctgccagctcgtaaattcataaataaaaggatataaaatctctgtggcaaataaatcgttatttgtcaaatagctgaatagctttcttgaatggggctattcgcaggagcgtagctatatacagagtttcataagaagtgaatactatttgtgagttgatatagcgcaaatgtatgaaaaattaataaattcaatctatcaattcatggatttcttttatatgcaagtgcaaatgtcccaaatatccctctatcatttcttgtagtgttacctttactcctgtaaagtcgcaccagtaactatccagcctgttcttatctaccgagttaattatttggatgatgtgcagattgtaacacttctacaactggattaagttagcccagtcttcattctgataatcttgcagagctatccacaagttattatcctgtgtgtaatcagggaagaaaagtaggtctttgctatattgcaaccgaaccatgcgttgatgattgttggatgccgaatcaatcaagtgaccgagaatctgcttgatggtgcgattctgcgcatttcgcctttgtgtgataacctctacgggcagactacttaacaatttctcttctgcttcaataacctgtgcaatgccagcggttatatgtataaaattactttcttgcataactttctaattttaaatacttctgcaaaagtaagttctttgcctatcatccacttgtaaaaaactgactttatcacagatgactacgcacgactatgcgatttaataacattcagcctacaatcttcggaaaagaatgtagaatacggagaacgggaagatagatattgagtaggcgaacagcctgtaaactctttaaagtctttcaccaagtgcgaaggatcgtaaaagccacaagaataagccaaatctacgaactccattcccggatgattctgcaacagatacagtgcccgctgaaagcgaactacccgataatattctttagggctcattcctacatagttggaaaatactcgcttgaattgcctatatcccaaacaagcactttcagcaagggtattcacgtcaatttgcggttgattgatgatttgacggatagcgtgatgagttctttggtagttacaatttgcatcgaccaaccgttgcataaagaagcgttcaatcaaccggatgcaggtttcaacggctggttcggcagaaatatttcgtttcaggtgattcagttcaatatcttccaaatcttctacatctatataatggttgtaaagctcactcatagaacaccgcacaaatggatttagccccagaggatgaaatataacggcaatcatatcaatattgccctctgaaatcaaacttccataagttgagaactgtccctggatgaaattctttggctgtaaaccttttgattggatatttagattctcaccccgatggaatagtctgtatcattactggctctacttcatcggtctttaacgcccaatagtatttaatgtattgggaaagtacaggtgacggatataaaatcttgctttctctcatcgttatttcgttaatctgctatgcgcatggcggtaaatatagaggttaattcccgcatgacaataaagtaagccgaaaatttagatgaatggcgtgtgttttgttccgctatatgtcagcgttaaacggtgcattgcccttgttaccgccacatatagcatactccggtcgatttccgaatgataattcctatcatccacctgtggtataatcacctcatcgaattctaaaccctttgccatgtgggcagagatgataacaataccctgcacaaaagccgaactttggcttgataggaaattaatatcaggaatttgtaatttatctgccatctcacgggcttgcgattcggttttgcagataatccccagcgatttataggcggatgcctgataagtggcaattaattctttaatagcagatagttcttctttcattattaaattgtaatactttcggtttctctccatgccgtgcgactggttcaagatcggtatttatccgtattttctgtgcaaaatctgtgatctcgcaagtagagcggtaacttttgcatagcttcatcacttcacctgtgacaagagctttctgaatcatatccgcagtagacgagccataaggattgaccgactggctggcatcgcccaacaccgttttctgacaagggaatagcttttgtattaccttatacaggattggagaataatcttgcatttcatctaccagcaaatgtttaacatcattctttgtaccaccatctaaagcgatatgcagatacgccaatggtgctaagtcggcatattcaagcgtgcggttcttccgcattttaaacagttccggcttatccatccatgtgaagaaatctttatagacttgcaggtcgttgtttccggcaaacattcgcttcatctcttttttaaggaaattccgttcggcagtcgtcaccgtgaaagtatattgtactttcatcatgtcgagaatataatccgtcattgcctcgaaccgttggcgcatggggtagcggttgaagcggtggaattgctcttcgataaattcagccgggacggtgatatgtttagttagcttcacatcctctgctctaaagtagtggttttcgatgtgcagaataaagcgatccagactggcgatgaagtcgaaagatgatttatattcgattcgctcaataaagtccggtgttggttttgtcagtagttcattcacctgctcaaaaaaactaaggtatttgtatttgtgattcagtacttcggaaagtatctgttccatgctggattccggtacggtttcttcgcccagttcgggcagcacgttagagatgtaatcggcaaacaccttgttcggagaaataatcaaaatgtcttttgaagagatactgccctgaaaagcatacagcaagtaggcgatgcggtgcagggcaatagaagttttacccgaacccgctacaccctgaatgatgagcgtccgggcttcctcattacggataatccggttctgctcccgctggatggtggcaacgatgttcttcatcttatcatctgcattagcactcagttccttttgcagaatatcatcgtggacggtcagcgcactttcgatcatgaattccatctttccagcccgaatccggtattggcgtttcaatgaaatatctccttttatctctcccgatggggattgataagatgcttcacccaattcgtaatcgtagaacatactcgaaataggtgcccgccaatcataaatcagggttgttcggctttccgaatcgtgaaatgtgtggatgccgatgtaaacagggattaccgtacagttctcgctcttctcttgaaaatcgattcgtccaaagtagggaatatccactattttggcaaaccgtcggcgtttgtcaattacactttcgcctatggcaaaatgattcaggatgctttcacgcatggagcgtatctcatgcggatcaatatctttactgctccaaaggtagtctttgtactccgccaatgtatctacatggtctttcacggacacatctgtatggctgattatctgcttcaaccgattgattatttgctgcaaatagcttctttcttgcttctctgtttgattgaataccatagtaatttattgctaaaggatgaaaatagagtcaaaacggtgcgcaaaattactgcaatcgagtaggataggaaatggctatttatagctatatatccataagttttgtatctttgcatgctcaaaatgaacgatatggatattcttgaacttgccctacataatcagcaaaccgcttggaatatactggaacataccggtattataccggcatgggagcgtattggggcaactgttcatctggtaggctcgcttaaatccggtctgctggcaaagagtagggatatagacctacatatctgtaccgatacactaaatattgcagctagcttttctgtgatgcaggaacttgccgaacggctatctttaaaggaagtccaatttaagaatctgattcagacagaagaagagtgcatcgaatggcacgccatttacgaagatgaggacatgaatacatggaagtttgatatgattcatattcgcaaaggctcaaaatatgatggtgtggttgaaaaagtaactgctgccattacgaaccaacttactcctgaaatcaagaataccatccttcaaataaaattcgatgtgccggacgggatacagattcccggcatagaaatctatcatgctgttttcgtgggtggagttcgcaattacgaagaactggaacaatggagaaaaaccaatccgctgacaaatagcttggattggctgccgtaatcaatagagaataccaaaactttctgcccggttgatagcttcgatcacattatcgacattcagttttgccaatatattcttgcggtgattgtgcaccgtgtaaatactaaggttcagtttagatgcaatctccttgctcaaaaagccctgtcggattagtaagagtatttccttttcccgcttggttaattgttggtctgccggaacaactgccgatgcaagtatctcacccgtcttccgattaataaccgtccgtttgattcgctccataggtgctctgcgttcattccacaaattatagtccacatccagcgggctgatctgctgtcttgcccataattcttcgggagttatcttattggtagtcatgcggcagagataagcgataaatctttttgtatctctatttccttttgactttctaaataaatgcgttcaaaaaacgaatatcctatgagtatattctaaatgaattgagccagagatagacaggatataccactttcagacagtttataaaacgtgttgattctattttcatcggcaaatgaaaatagaatcaacacgttttataaaccattaaaaattaaaagtatggaagtagtaaccattgaaaagagaaccttttcgtatgtctgcgaacgattcaccgagtttgcaatagaaagtttgtgcagcactcatatccagaaagtagaaaactggctggatagtcaggaagtgtgtctgttgttgggctttagtaaacgaacactgcaatattatcgtagtagtggacggctggcttattctcaaatcggcagcaaaatatattataagtcttccgatattgaaagaattattgcgaacagtgaaacacaaaatcaatcacccaaacaaattatgccttatgaaaagaactaaagaagattactcgtctttcaacctattttccattgtcggcacatgggaaagtgttaatctgaatcccacggttatcatctatcggagcgacaaagagtatctcttttctattatatatgtatcggaaactaccaaacaggcttcacccgctacttatgagatacagcaagatggtagccagtattttattgccattgcgtctaaacggctctatatagattatgattcggcaaaagatatacttagtatttcatcgttgggtgactatctgcgcaactaatcagccatctagccatcttgaaatcaatatttcaataaaacaatctttcaatcatggaactaataaataaagataccccacaagtcaaagaatttatttcttcgctcgattcgatgctggacagcattgaatctattgtcaagcattacaagccccaccttaacggggaacgttttctttttaataatgaggtttccaagaaactgaatgtcagtttgcgaaccttgcaggtgtggtgagatacaggactaatcccctttatccagataaaaggtaaaatcatctatcgccaaatcgatattgataaactgcttcaaaagcactactttgaaagttggaaagagtaacctgccaagcccaaaaacattgtttttcggaatttaatttgaatcattgacttttccagtgaagtatttagtctgtgcaagtctttagatgaaaatacgctcgaacatagtgagaggaagattttcatctaaaccgaaggctcggacttgaacaagctaaatacggaacttacctttgccaatgcttcatattgagttctggaaaacttactataaaagaaaaggattgagaaaatgaaattcattcttcccaatcctttttcaatattagctactatttttattatatagccaattccgacaggcagctatttactttttgcatatccttgaaaatattctgatccaatacccttgcatagtgttttgttacgcttgtatctgcataacctaacatcttagcaacattctccatactcacgccatttgcaaggcaaatgcttgtggcatagctatgacgggctatgtaagtaatatttggaaatgcaataaaaaacagaatgacgataattaaacgtaaaacgtttataattaagcattttgcaagaattgcagaacagacatacctgcaaaagacaacaaaatattgcgacgtttcagttaccagactgttagccgcctgtttcggaaacaacggcaggtaaccgaatttttactgataggaacaaagcggatttgtattcactgtttatcaatgttttgcatgccaaaggacgcttttcaaaggagtatttttacaacctaaaaaagagcgttatgaaagtggaaaaattcaaggtgctgctctacctgaaaaagagcgagccggacaagaccggcaaggccccgatcatgggacggatcaccctcaaccgcacgatggtgcagttcagctgcaagctttcctgtacccccgggctatggaacgcgcgtgagagccgattgaatggcaagagccgggaagcggtggagaccaatgaaaagatagagaggctgctgcttgccgtacactcggccttcaattccctcatggaaaggaaaaaggatttcgatgccgccgcggtcagggacatgttccagagtaacgcgggcatgcagatgaccctgctcaaacttctcgaccggcacaacgaggagatgaagacccgtgtcggcgtggaccgtgcgccgacgacaatgtcgacctacgtgtacacccggcgcactcttgccgaattcatcaaaacggaattcaaggtctcggacctcgccttcggacagctcaacgagcagttcatccgtgactatcaggatttctgcctggaaaagaagagactggcgatggagacggtgcgccattacctgtccatcctgaaaaagatctgccacatcgcctacaaggaggggcactcggagaaataccatttctgccacttcaagctgcccaagcagaaggagacaacaccgaaagcactcagccgtgagaatttcgagaagctgcgtgatctggagataccggaaaaacgcaggtcacatgtcatcacccgggacctcttccttttcgcctgttacaccggcaccgcctatgctgatgcggtaagcatcacccgggagaacctcttccgggatgacgagggcagcctctggctgaaataccggcgaaagaagactgactacctcggacgcgtcaagctgctgccggaagcactcgcgttgatcgagaagtaccgtgacgatacccgcactaccctcttcccgccgcaggactaccacacgctcagggcaaacatgaaatccctgcgcctgatggcggggctgagccaggaccttgtctaccacatgggaaggcattctttcgcctcattggtcacgctcgaggaaggggtgccgatcgagaccatcagcaagatgctgggacactccaacataaagaccacccagatatacgcgcgtgtaaccccgaagcgactgttcgaggacatggacaggttcgtcgaggcaacccgcgatttgaaacttattctttaatccttaaacaatcattatcatgcgcagtacattcaagcttttattctacatcaaccgtaacaaggtaaaatcggacggcacgaccgccgtcctctgccggatcagcatcgacggaaagaaatcggctgtcacgacaggcatctattgcaaacccggagactgggacagcaagaagtgtgaaatcaaaacagccagggagaacaaccgccttgccgccttccgaagccggctggaagaggcgtacgggaacctgctgaggaaccagggagtggtcacggccgagctgctcaagaccaccgtatccggtgccaattccgtgccggaatacctcctgcaggccggagaggtggaacgcgaacggctcagggtccgctccaaggagatcaattccacctaccgccagtcgaagaccacgcagcttaacctcaggcagttcatcgaatcccgcgggatgaaggacatcgccttttcggacatcaccgaagagttcgccgaatcgttcaaggtctttctcaagaaggagctgggacacaggaacggacacgtgaaccactgcctgtgctggctcaaccggctcatctacatcgccgtggaccgggaagtattgcgtgccaacccgatagaggacgtggcatacgagaggaaagaagcacctaaactaaggcatatcagccgcagtgaactgaagcggatgatggaaaccccgctgcccgacccgatgatggagctggcgcgcaggacgttcatcttctcctcgctgaccggtctggcctacgcggatacgagggctctccatccccgtcacatcggaacgacctcggaaggaagaaggtatatccgcatccgccgcgccaaaacggacgtggaggcgttcatcccgctgcatcccatagccggacagatactggatctttacaacaccacggatgacgacaggccggtattcccgctgccggtccgcgatgtcctctggtacgaggtacatggaatgggcgtggcattaggcatgaaagagaacctgtcctaccacatggcccggcattcgttcgggaccctgacactgaccgcgggcattccgatagagagcatcgccaggataatgggccatacgaatatcgacagcacgcaggtctacgcccaggtcaccgaccggaagatatcctcggacatggaccggctgatggaaagaagaaagcctgcggccgacaaggaagccgcaggctaaataaaaaaattgccgccggaattgtatttacaattccggcggcaatccttaagcttgaatacgatattataccaatgctgcgtgatagttctcctccaacagcttctcgatgtccgactgcctgtacaggatcttcccgccaagctggatatagggaatccgcccttggtccctgtaatcctgtaggcacctgcggctgatcctcaacgttccggaaagctccctgtcagtcaggaaccgttccccgttgaagggaggacggttgtcacgggcaagacgctccacttttttctccatgttgtccagcagggcaaagaacctgcggacacgttcgttctccttgtcgataatgccttccatctcttccgctctttaaaggtttccgttcttccttccttctctcattgccttctccttgcgtctgatgccgacgtaggcgatcagcttctccacatcctctggcttgtaatagaacttgcgctggaggcgggtgaacgccagccgtccggtatcgcggagtgtctgcagggtacgtggcgagatgtcaaggcgcaggcagacatcctggccgtccagtcactctccgggttccttacagcggtttctctcatacagtctgtccacatgtgcggacaggttctcggcgcgtgccagcatcctctcaaggacaccggcctcgatgtagcatatttccatatttttcaacttgtttaaatgtcagtgcgaatataagggaagaaaccatgagaggcaagcgcgaccggtacactggcaggaatagtcatggatagtcggtttttgtcatatgggaaggaaaaatactccgtagccggtcggttttcacgaccccctttggaaaacctgaaggacgggtgcgtcacggcgatgaaaaaagaaaaatccccaccggaagtgaagcgaccccaaaccggcagggagtgtaataataaaggaacggactgttcagcccttgatgtaaccgtactttttcaggtcgtccatgaaatgctccggcgtgtcggtcctcaccgtcaccccgtgcagtttcctgtaccgcccggagaaattcaccatgtactccccgtcggtgcacccgctgtcaaaccagctgcgctcacgcaggacgcgtacaaactcggaagggccggaggcggcaatcctgccgccatccgccaaaatatacatatgcttgctcatgccgataattttttagttcttaatttataatatagcttctgttcatcgtccaggaaagggatgttccggagcgcggtggccgcgggcacctgtcccctcgtggcgaaggtaactaatttatggagaaacagcacccagttacgcatttttgtgaagttggtcgttcccgaatgctggcggaactcaaccgtcttgtgccgtgaataggcttcgagattcaccttgtggtaacggttgccgattctgtttttcagctcgtccaccgtccgggccgagcgtatcatctcatcagatacatggcccaatcccttgcaatagtagttatccctgcgggatgccggcatgaacctgtcgatgaccggttccaaatgtttgtagctcagggccaggttacgccaggtctccatgctgaaaccggcggcatcgatatgtacgtgaagcccgcagctcccgttcaccttcacgtcacacaggtcaagtatccagcataccttctccagttcccgcaggccggcttcgccgaccagtatcggactgaccagttcgaaagtgtcgttgccgcttatactgttgtccgtcacgagtttccaatgcggacgggtggtatgattgtagctttccaccataacctcgatccccgcctccctgagctcgcgcgcgagccgttcacgggagcagttgtaggcctcgatctcgataccgaacttgcggttgaaagtatagtccaacgcggctgtcgccgaatggatattcggaccgtcctcacgttccctcatccggcgcagggcgttcactacaaaaccgtaattgccgttggtcaccatcctggcgatttccgcacggggaacccctaaaaggaacagctgttggatcttgcttgtcttcgttgtctcttgtgctaaaatgcttctaacttgctcgttcataacttgttaactcctttatttttacactactaagataatgcttttataggagaggtcgtaattataaaagccttattatcatgccattagcttactttatcttaggctaaaagtccttattcaaggtgtctgtatcctaaccggtcggtatcggattcctccggattgatggcatatcttctccaccggttcaggaaggtcggttcttttccttttctgagttcatatcttaaaatcttaaattacacaaccggtattgtcccggaatacaaaataaaggaagaagaggaccggacggaacgaaaccacctgtcacttatagtcatccaaagccggttatcgctatgatacacatgagggagacggacataccgttcctctcggacggttcttcctatgcggaggtggcgtcagaggcccgctgcctgtagcggctggaagaacgggcgggattccgtttccctgtccacctatccttttaaatccttatgggcaggtgcgggagcatgcatccaccctgatacggatccttaaattatcggtccacaagaagtgtgaaagtatcaatccgttaatggaaccatgagaagcaagcatggccgacacaccggcaggaatagtcatggatagtcggtttttgtcatatgggaaggaaaaagaaagccgaagcgggtctggatccactaccccctttggatatgtgagaggaacgttgcgatgaaagaaaaaactcctcttcacgcatggataaggcaatgccggaagtccggcaataaaaagatgtggcttctctacccgggtaaatgccacgattacagacttcttcttgttcctattataccatcaggccgattaccctcaggttaaaaacttatccagaatatccgaatccaacccgtgacagacccggatgggaaaggcgatgatgccaccggatatgtgtatagccatatgaccggacatggagatacgacgataacgatacgtccttctatcggaataaggatatggcgggatgcatggataaccatatatgattatcggaacagcggtgtggcaggctgtgggtatatgacagcgtccatatacctgatctcgtttttttattatcggtatttcaaatgtctcaaaagcctctttgacaggtttccatccgggatgatcgcctgaattcgcatgtaccggactttctatttacctgattccgtaatcgttcctgccatccgttttttctctgtggctgtcgcttttttccttgtggcatcatggtctgttaccggatgggaagagccatctccatcacaaccatgaattatagtgtagccatatttgtatatagccgtatgatacgctatccggataatgctatcacagaattgcgatatagccggatatcaaaataaggatagccgggagtgaagggagcacgcacccttccggatacagatatctcaaaatctccatttgcagaagtgtataaatatcaatctattaatggagactataaagaaaaaacataagtcacacacgactacctgtcattctccatttgtagaagtgtagaagtagcaatccattaatggacaatagagcatgtaaagggccgatttcccgtatattcgcctccttatccccgaattatgggcgtaagtcacatggttacggagatatatccatcctttaatggggagaacagccggcaaatatctgatagaaatgccccgcaaaccacaggaaaatagccttacaatgagctgatacacaataattattggagaaacgaggtccgctcctgcggacagcaagttgtgttttcgttaaacgaaaacaggacggtttaacggcaatcatgccgccaaaccgtccgttaagcaggctccgaagtcgcttgatttacctgtaaaataaattcttctatcttagagtgcttttccaataaattgttattaagaataattatttcctttgcagattttcgaaataatttgatggtgtcattcctgtttgctttttaaacattcgactaagatgttgcggatattcaaaccccaacccatatgctacctgtgcaatactttcacccgtagcaagttcgttttttgccagttgtattatgtattgacggatataattacttgctgtatcacctgttgtcttttttatcatatccccgaaataattcgatgacatgcaaagtttgtcggcgcaatactgcactgtcggtaagccatatgtcagttgcatgttcctgtcaaagtaatcatgcaacaaacggtcgaatttcatcaacatatccgaattatcgagtttccgggtgatgaactggcggttatagaaacgctggcagaagttcaggaccaactcgatatagcccacaatgatggagtcttgaagttcatcgtgccttttctggagttcatcccttatctggcgcatcagtgatgtcaagataccatgttcttcgtcggtcatgtgcagggcttcattgacacggtaatcgaaaaaggaataattctttatcgtcttttccaacggggtgccgtgcaacaggtctggatggaacagcagtgcccagcccgtcagcatcactcgttcaccgttgtcctcttttccgccgatctgtccgggggcgacgcagatgaccgttcccttcttgtagtcgtacttcccacaaccgtatgccaggtctatttccgcttcgtcatgaaagaaaatgccataaatgctgtaattgttcaggctatgacgcactggggacacttccgcatagtcaatgacactgaccagcggatgcctgtcggtatgtcctacccaccggctgtaatcgcccacgtttctgaccttcagaattttgttcatagcatttatatagctcctttcttgcgaatacaaaggtacattatttcaatcacatagccgaatgtctgacataccaaattcagtaaaaatgatacaagttacccacttatcgttaagtccgctgtcgtataacccggtaattttgcatcatcaaaagaaatcaaatgatgaatgaacgaattgacattccagcggaattgtatgaagatgaagtcgtgtgcttctttgcagaccgttatcatacttctaccgaaaatgtggtgagatgttttctcgtacaggacgggatttgcccggaacaggaaaatgaacccataactttccggttggaagataatgaaatggagattatgcgaggcttgacttatggaggtcattcttaaaaattacaggatttatggacagaagagattttttgaaaatgtcatcaatgaccgccttactggcagccggggattggacgggattgtcgaaaatctttgcccaatctacgtcgcggtctaaaaacggttattcgaacgggaataatccatcggggaatatggaatacagaaacctcggaggactggccgtatcagccatcggtctgggctgcctaccgatggtaggctattatggcgggaaatatgaaaaaagggatatgattgccctgatccggcgtgcttacgacaagggtgtgacctttttcgatacggcggaggtgtatggaccttataccagcgaagagtggctcggcgaagcactcgtcccgttccgtgacaaggtaaaaatcggttcgaagttcggcttcggcgtggaggaaggcaagccgaccgcactcaacagccgacccgaccatatccgccgtgcggtggaagggtcgctccggcggttgcgtacagaccgtatcgacctcttgtaccaacaccgtgtcgatccgaacgtgccgatggaagaggtcgccggcacggtcaaggatttgatgcaggagggaaaggtattgcactggggactgtcggaagccagcgcacgctccatccgtcgcgcccatgccgtatgtcctttatcagcggtacagagcgaatatgctatctggtggcgagaaccagaaacgaagatatttccgacgcttgaagaactgggcatcggtttcgttccctattgcccgttgggacgtgctttccttaccggggtaatcgacgggaacagccgcttcaaacagggagaccgccgatggaacctgccgcaattcacgcccgaagccttaaagcacaatatgccgcttgtcgcccttgtccgcaaatgggcggaacgcaaaggcatcaccccggcgcagttcgccctcgtgtggatgctttcgcgcaaggcgtggatagccccgatacccggcacgaccaatcccgaccatctggatgattttctcggtgcggcaaccgttcgtctcactccctacgaaatggaagagttcgacaaggaatatgctgcaatcgaccttatggggcaccgtgccgacccgtttaccgaaagccaaatcgacaaataaagagtataaatgatgaaaaagtttttattgattccgtttttattgcttgccgtcttgtccatggcggcttgcggaggcggttctgacgagccgttcactcctgaacagcccgaacagccggaaaatccgggcggcggtgatgattccgatgataatcccgacacgcctgttcccggtgggaacggtcgctaccttgttctttatgcttcccgcacgaacaataccgaacgtgtggcgcaactgattcagacgacactcgactgcgacatgcttgaagtggagccggaaacggcatacgacaatgattacaactccatgttggaacggtcgcaagaagaactggctgccatccgtcagggcaattatccgcctgtcaaaacctcgatggagagttttgacgattacgacatcgtattcgtcggttatccaatctggtacggcagtatggcgacaccaatgcaaatattcctgtattcccatgcctccaaacttgccggaaaacaaatcgccctgttcgccaccagcggcagcagcggcatttccgcttcggtcagcaaggcccgtagcctttgccccgatgcgacaatcatcgaccgtaccctattactgacctcttcaggtctttcgcaaatggcgacacgtgtcccatcatggcttgaagaaatcggagcgagccgtgaagaatcggaaacaccggacgaaacatctctgaaaatgaagatctcggttggcgaccgcacgattaccgccacgatggaagacaatgcggcaggccgggatttcctctcccgtctgccgttggaggctacgctgaacgactacaacaacacgaccgagaaaatattttatcccgatccggctctgacgaccgaaggcgtgacacgcggttgtgcgcccacgccaggcgacatcacgatttatgcgccgtggggcaacgtggcgattttctgcaagaactggtcacatagcaacgacctgattaaaataggccgtatcgacggcaatgacatcgaagctctgaatatcggaggagatataacagtaaaatttgaaaggcaataagtatgacgatagaagatttcaagacatacgtaaagacacggaagcctcttgatacggaggaaatacaccgttttatggacgagatgagcaacgaagcccgtcgcgtcactttccgtctgaatacggcttatcatacgccggatgaagtacgtggactgttatccaaactgttcggctatgaagttccgcaatcattgcgcgtttttccacccctctatgcggatttcggtaaaaacatcaccgtaggcgaaaatgtgtttatcaacgcctgctgtcattttcaagaccacggtggagtcatgataggcgacggatgccagataggtcataatgtggtctttgccacgctcaaccacggtcttgcaccagaagaacgaaaatccacttatcctgcacctatcgtattaggcaggaatgtgtgggttggctcgaacgccaccattctgcaaggcgtgaccatcggtgacaatgccgttattgcggcaggcgcggtcgttacgaaagacgtagcggcaggtacggtcgtgggcggcgtcccggcacggttcatcaagaatattaacaacaagtaataacttaaaaacaagtcgattatgttaggtaatttcacttttcacaatcccacgaaactatacttcggggaaaactcattggagaatttgagtaaagaattaggcaagtacggagaaaaagtcatgttagtgtacggcggcggctccatccgcaagaacggcatctacgacgcggtgctggcggagctgcgcaaagcgggcaagcagacggtcgaactgtcgggtgtcatgcccaaccccaccatcgagaaggtgatggagggcgtggcactcgcaaggaaagaggcggtggattttatccttgccgtcggcggcgggtctgtctgcgactattgcaaggcggtggcaggctccgcgtactgcgaacatgacccgtgggaatattatttcaacaactggggcgaaatgacctgccggtggattcctgtcggctgcgtgctcacgatggctggaacggggtcggaaatggacagttgttccgtcatttccaaacacagcgaaaaccggaagaagttctattatttccgcaatccggatttctccattctcaatcccgcttacacttataccgtgcccaagcaccatacggtggcaggcatttacgacatcatgtcgcacatattggaacaatatctttcgggaacggacgacaacacgaccgactacatcgccgaagggctgatgcgctccctcgttgtcagctcccggaaagtgctcggcaatccggaggattacgaagcacgcagcaacatcatgtggactgcgacatgggctttgaacgaaggtgtgtcaaaattctcaccttcttttttatgcccaaagccccgactttcacaagttggggctttgttataacctgaagattttgtatctttaggcataagaatttatactatggcaaagatacattttcgtccttacaatcccaaccaaacagtgctttttcctcaaagaatagatgaggatattgcagataacgatccggtgcgcatggttgacgccctggttgagggcctgaatcttgaaagtttcaggaagctatataaggaatgcggccgcagcccttaccatcccaagatgatgctcaaggtcattctgtatgcctacatgaacaacgtctactcctgccggaaaatcgaaaagctccttcatcgtgacattcattatatctggcttgccggatatgagaaaccggatttcattaccatcaaccgtttccgcaatcgggtgaagaaggaaatcaacgaggtgtttacccaaaccgtactccttctctcttccaaaggatttatcagtttgaacgtggaatacattgacgggacaaagattgaatccaaagccaacaagtatactttcgtttggcgaaaaacggttgagcggaaccgagagcgcctgatgaagaagatacatgtcctgctagggcagatagacgatgtcatcgcccaagaaaagtattcggaaagtaatgaggaggttgagttcactccggccatgctgaccgaaatggcgggagaattacgtcatgtgctggaacaggttcccgagccttccaccaaggaggaaaagactgagctgaaaaagagacgcaaacagctgaaggagctggaagaacatagggacaaactccaggaatacgacagtcatctggacacgctgcaagagaggaattcctattccaagacggacaaggacgcaactttcatgagaatgaaggaggatgccatgcgtaacgggcagacgaagcccggttacaaccttcagatcggcaccgagaaccagttcatcaccgattttgcactcttcccgaaccctacggatacactgaccatgatccctttcctgcaatctttttcaaacaggtatgaccggatggctcatacggtggttgccgattccggctatggttctgaggagaattaccgcttcatgtcagagaacggcatggaagcttacgtcaaatacaactatttccacatggagcagcggccgagattccaaccggatccgttcaaggcagaaaacttctactacaatgaagaacataacttttgcatctgccctatgggacaaaggatgcggaggataggtactagacatgtgaaaaccacatccggatatgtcagcgaaaatgccaggtacagagccgtcagatgtgaaggctgtccgctaagatgccgttgttttaaagcaaaaggaaacaggacgatagaactgaatcacaggctcagaaaatacaggcaaaaagccaaagagcagctctgctccgaggaagggctgaaacacagaggacagagatgcatagaaccggaatccgtgttcggacaaattaaaaacaatatgaattacaaacgtttccgccattttggaaaggataaggtcttcatggattttgccttctttgccattgccttcaatataaaaaagatatgtgcaaaaatggctaaagaaggtatggattggttgattagactgtattatgagcttacagctgctgtttttagatgctgggaacacataaatcgaagaaatcctcaaaatgtcgcagcttaaaaaaatgagccgatttttatagtcaacgaaaaaaaagaaggcgcatcgggtattacgacacaccttccttttgttaaatgtatttcgtgaacttgtatcggtcacgcaatttttttgttcctcttcgctcaaagaagtgaaattactttccgaatagctttccgatcaagtctttctttcctatcttctgcaatgcttgtgtgatttggcggcggaactccggtttataccagaaaaagaactgacgttgtgccagtttttgttctttcgtatgagccgtatataccttttccaatgtatagggatgataccctgtgtagtacatctccgttgccagtgtcatgggggtaggtgtaaaatcctgtacctgttcgagttggaaatgcagcttcttagtctggatagccaagtttgccatatccgcctcggtacaaccgggatggctggatatgaaataagggattaattgctggttcaatccgtgttgtttgtttacacggtcgaatatctttttgaattgcccgaaaagctcgaatgaaggtttgcgcatcatcttcaggacattgtcttccgtatgttcgggtgcgactttgagacggccggagacatggcgagctatcagttcctccatataggtatgggctgccttgttcagattgtcatccgcataccggtgcaagagcaggtcatagcgaatgccgctaccgataaacgaacgtttgatttccggtatgctgtccacttctttgtatatatctaacaacggcgtatgatctgcattcaggtttttgcagatgacaggggagatgcaagaaggtttcttgcactgggcgcagatatccggattcttccctttcatccggtacatattggccgaagggccgcccaggtcgctcagatatcctttgaagtccggcatttgggtgatctccttaacttctttcaatatggactctttacttcgtgaggcgataaactttccctgatgcgccgagatcgtacagaaagcacagcccccaaaacatccccggtggatgtttaccgagaacttgatcatctcgaaagccggtatcgtcttccctttgtatttaggatggggcaggcgggtgtagggcaggtcgaacgacgcatctatctcttcttccgtcataggcgggaaaggaggattgacgactatcgtctgtttgcctaccttttgcaggatgcgggaagcctgctgcttgttggattcttcctctatatgtttgaagttcttggcctgtttcagcttgtcgtgtaggcattcttcatgggaaaagaggttgatatcttctggtagcggttctaccgtatccgccaaataagccgtttgccgtatatctttaatctcatggaagggagttccggcttgtaaccgactgaccagttctttcaggggaagttctcccatgccgtatatcagtaaatccgccgggctgtctttcaagattccggggagcagcttatcctgccagtaatcgtaatgcgtgactcggcgcagggaagcctctatacctcctaatacgacgggaacatccgggtagatttctttcagtatcttcgtgtaaacgatgctgggataatccgggcgcatgccggcacgacggtccggagtataagcgtcgtcactgcgtaggcgtttgttggccgtatagtgattgatcatcgaatccatcgctccggcagaaactccgaagaacaggcgaggggctcctaacttcttgaaatcccggtagtctccacgccagtccggttgcggaacgattgctacacgcagtcccatcgcttcgagtgtccgcccgatgacggcggctccgaatgaaggatggtccacatatgcgtcaccgctgaaaagtatcacatctatatagtcccattcgcgggcttcaacttctttctttgttgtaggcagccatgcctccggtctgaatgttctcatgactgcaaagatacaaattatattctgtctgtcatgacgggctcaagttataacttttgcttatgggtgataggaattaatgatgtacaaggggtatggaaatcttttacctttgcaaataaaaggaaaaataaagtttgcaagcgaactttatagtagccggaaatgttttaatagaaaacatatcattaaaaaacaatacaatatgaaaacattgacagacgaaaagctcacgatcgtaggggcagcaggtatgattggttcgaatatggctcagacagccatcatgatgggacttacttctaatatttgtttgtatgacccgtacgctcctggtttggaaggggtggctgaagagttgttccattgcggtttcgaaggtgttaatatcacttttacttccgatatcaaagaagcgttgactggtgctaaatatatcgtaaactccggtggggctgcccgtaaggcaggaatgacccgtgaagacttgctgaaaggaaatgccgctatcgccgaagaattcggtaagaacgtaaaggcttattgtccggatgtcaagcatatcgtagttattttcaatccggccgatatcaccggtttgatcacactgttgtattcaggtttgaaaccttcgcaggtgacgactttggctgctttggactctacccgcctgcgtagcgaactggctaaacatttcggcgtatctatggatgttgtagagaactgccgtacatacggcggccatggcgaacaaatggctgtttacgcttctactgcgaaagtggaaggcaaatcgttggctggcatgatcggcacggatgccttgactaaagaccagtgggctgaaatccagacgaaggtgacgaaaggtggcgccaatatcattgctttgcgcggccgttcttctttccaaagcccgtcttatgtttccatcgagatgattgctgccgctatgggcggtaaaccgttccgctggcctgccggcgcttatgtctccaatggcaagttcgaccatatcatgatggcgtgggaaacttccattacaaaagacggcgtagcattgaaagaagtaaaaggaactccggaagaagaagctgctttggaaaagagctacgaacatctttgcgcattgcgcgacgaagtgatcgcaatgggtgttttgcctccgatctccgagtggcacgcattgaatccgaatattaaatgaagggataggtaaaaagatttaggttatcaggttatagatatttattaaaagagtatgccgaaaggattttccattcctcctttggcatactcttttttattgattacagtgcagtttgattatccgataatttccggataagttcagcaacgtttcgtccgtccataagtccatgatgtgcacagaccgaaatgggcaacaagtatttgctattctcctgcatcaatttccctgtagaaatacgcggaacggaatctccgttcttaaaagatgtggcatgcttcatttcggaaaaagcgaaccaaggtaatgccgaatagcgaataacatcttgtctacttgtatttttggaaaaagacaatcctgttccgttcttaaccctttctatttcctgtgttgctttttggataaacagatcgatatccggatcgtattcaaaaaagccgaaaccgaaagtcccgtcttcacgcccaatagtcggagagatatggatcgtatcataacggactaccgagtctttttctattcgtaatttgaatgcatcggtttcgtttacacacttcagtaagaaatgaagggaataaaggaaaaaagaaacattctgttctttactttgtctgtagacatcagtaaaatccacaagagttgtaaccccgaaaaaagggtcgtcgaatgcagaaaagaaagcgaaatgctcttttctgttccaattgtctaaatcgataacttgcttcatctcattcttttttataaatgcctttccggataaagcgcatcccaccattgcggttcgtctttcaggtatttggcgaaccaggcaaagatggtgttctgccattcgagacgtttcttataatccgcaacgccgtgaccctctccgtctacctgtacgaactcgactgtttttccaagtagtttcaaagccaggaacatctggatgctttccccgacgggcacgttcgtgtctgcatttccgtgaagcaagaggagaggtgtttttatcttgtcggcattgaataacggactatgtttggtatagaactccggattattccacggataagtgcctgtattggcaaccgagcaatatccatatccccagtaaccttcaccccaatagctactcaaggcactgatgcccgcatgactgacagcggctgcaaacaggtcggtctttgtttgcaggtattgtgtcatgaaaccgccatagctggcaccggcacaaccgattttcttagggttgacgaacgaatgttctttgcagaactgttctgttccctggatgatttcatcggcggtcttgtctccccaggcgtttacgtgacgggcggcgaactcttgtccgaagccggtcgtgccgcttgggttcagagtgtagaccacatagccgagggctgcatacatgtgcatggagtagctgaattccaacgcacggttagtgggagaggttccgccataataatagacgatcatcggatatttccgggatgcgtcgaagttgggcgggagataatagcgcccttgaatgatggtcccgtcagtagaggtgaaattccagtcgtgcacttctccgaattggatgtctttcagtttgtcagccgacaagtcgtagatcagttgtgtcttcttactcttggtgttgtagctgtacaggcggttggcgttggatacgctctgtccgtagtaatacatgaccggagcggcttcggctagcgagtaattgtaaatgacgtcttccggcaggtcgaggcggcggattttcccgttggccggattgcaggtatagacacgctggtaatcctggtcttccgtcaacatatagatctgtccgtcaaatttactccattgtgcactagtgacgttcggattgaagtctttggtaagtgctttcgctttccgcgttgccggatcgtacaggaaaagctgtccgtcgtaagtgttggatatctgtccctctttgatgttcaggccgatattgtcgaaggcattgccagaaccgaataccatcaactgcttgccatccggtgagaagatagccccattgatgtacttggccctttcccataaggtgtcgaccgccatgctctgcaaatccaacttatacatggaattgctggagtgaggcagtgaagtgtaatcctgctcattggtactgaacagcaggtaacggctgtcggcactgacatcattgataaaggtattgttatgcccgtatgtcaactgctcgtataaaccggtttgaagatcgtagcgccagatcaagtaacggttgcggaaccccggcagacgatcgttcggttccagaatacggagcatatccggtccgtctttaggtccctcttcctggatggtatagagcaatgtcttttcatccggagtaaagctgaagctgccttccggcagattttccgccaagatttcctcctgcatggtagccgggtcaacggttaccaactctttcccgttcattccggtacgggtgaaatacatcttgctgctcgtcggcatccagtcggcagttaagataaaccctttgtcctgcaataaaatccgtccggtcgcagcatcccgcaattgggcgtattgttcgcttttcccaccttccatacgggtgtaatattttaccaatacatattttccatcaggtgaaacgctcgttccccggaattgcgttccttccaggatatcgcgtggcgtgtaccgctttttaggatcgagggaggctatgacctttgcttcctcttcgctcttaaatttggctgtcagcgtggacggacaggtatcggtgtcggctgtcagatatttgattaccacttcataacggtgcggttccaaagccaactcggaagtggcgccgaccggtttattgttgacgaacacttcgaatgtacccgccccggaaacctccagcgaacctttcgtgtagcggtcgctgtttaggtagaacgaatagagatgcaaggcatatcctttttcgggcgtcgggacggtaatcagtccggcggtatccgcgtcgataacggctgcattgccgagggcacggccgaacgggatagtcgacttgactaggtttttcgcttcgaaaggtttgccatcgacgttcaagctgtctgtcaggatcggtttgttgaccgtaatcggcccggcatggaggtactgcatcactttaacgtcttttgccgcttgtgtggcgaaagccgaaaagaggagtaacgggataagtttgatcttctgattcatgtatcatgtatatttagaatgtctgtttgcgggtggcgctaatcatatagagccggtcactgtcttccatcgtgttgacagtgaagaaaggggataacatgcgtgccaattcttccgcgggaggcaatccttccgagagttttccggcatgcttgtcatggtgtccgttgatcctgtcgcggctttcgctgtggcagaccaccagtttgccgccaaccggcagtagtccggctaaatgggagatcagtttctccggtttctggaaatgggggaaaacactgtaggcgatgatatagtcgaaagattctcctcgtatgtcccgtacgtcctggcaacggaagtcgacgataggtgtcgcgtatttgcttcgtgccttttcgatcatttccggagagatatccactcccacgatttgtaagggggaatagggcaggagataactttccaatacgcctgtcccgcatcctatgtccaatatacggagtcctttccgcaggccggtccgtcgcaggatgtcgttcagcttttccggatcatggtagcaaagctcgtcccaccggtcggcaagggtgtcggagaaatccgctaccttgttcatggcagttgtccctcccagacaaaacaatcggcaaacaagcctttgaggtctgtcgcctctttgaacagtccgaacacggaagagccggagccggacatagatgcatagacggctcccttttcatacagcgtttctttaatccctgcaatgactggatgtttcaggaatacgcttttttcaaaatcgtttaccatcaattctttccattctccgacaggtctccggatgatttctttcaaagagatagccggagctgcgggcgtcaccatcgaataggcttccggtgtcgagacggcaacatccggcttgactagacagagatggtagtctgccagcgacaattccaccgtttcgaagatatttcccgtgccggatgcgaataccggcgtattgcggataaagaacggacaatccgctccgatggaggaggcaagttcttccaagctgtcttccaggatatgaagtccgcaatagtcgttcagcaacttcagcataaaggcagcatcggccgagcctccgccaagtccggctccgaagggaatagctttcagcagatggacttccagttccgggatttcgtactgtgacttcagcagattcagtgctttgacaaccaagtttttttctattggagcatctaccggtattcccgtttgtgtgaaagagaatgtatcggctctgactatttccagcgcatctttcaccgggatcggatagaagatagtttcgatattatggtagccatcgggacgtttgctaacaacattcagccccagatttattttggcattaggaaaactgatcatacgtttcttttttaatgattggcaaatgtaagtattaatacaaacttttccatacaaatcaagtggtaactgtgtcaaattatggctggtggaatgatgacttagttcgttatgaactacggtcatactgttggcaaagatagtaaatatcttgtaacagcttatatatagttgttatttatcagggattttctgtgtttattttgcctgtggacggattaaattatacttagaatctccggttagggtatacaagggtgactaaccgctggtattttatcgtctttccctttattgtagccgatttcaagagacatatcaggtcttgatttttagtaatcgacttagttcataacgaactaattaaattaaaatatcatggcaaacgaacctaaaaagcgcagtatcacaggcaaattggtagccaacgtactgaccgaacgtgaggatgacttcacatgcaatgtaacctatgtcgcaaaccgctctatcaaagacctttgccggataagggcaaccaaagggagcaagtacactgctgccgagtatgagagcatgtgcaacgatctagaagagacggcgaaagaagagatgtactctggttctaccgtggaattaggctttatgaacaactctctcggagtcgacgggccgtttatcgggccgggagctacttttgatcctgcaaaggaggaaaatctacccacaatcactgccgttacagatgtcgtgaccgcaaaggtcaactcgcaactcaccccgttagtaaaaccgtccttaaagaggtacgccgtaatcgcttcccttataaactgagggtaggtgaggatgaagaaaggccgggcgaactctgatgttcccctttttatacgatggccgtaataaaacaagtataaactacataataattatagcatatgaaaaataggtacttaaagagtttgacagcgcgtgtgacgatattgatgctgtcttttttatgtctggcaggaagccagggagctggggcacaaatcccgatggagagagggaacagctcttcagccagtgttgtgtcgtcacaaaagccggtaatgccccgtatgactaaaagcggaggtaatgctgtttcggtaaatggtatggaatacgatacttgggctaatgctgttgcggcgatcaattcaaatgcgacagagacttcgttcgatatcgtattgttgaatcatgtaatggatgcaaagataatgccatctaaagcgtgtacgattagtgggagcacgtctttgatcaatttcgcctatattaatgaagatagctatcttacgagattgcaaatgttggctccattgacgtttaagaacattacgcttcaggtatggcagatagctgcgaacgggcatgtgttaacgtttgacgaaggagttactgttgtgagtaaatatacttctggaggaaatgatattgccggtattcggaatatctggggaggaacagattcatcgagtgatgtggcaagttccgatattacgatcaaaagtggccagttcggctggatatgtggcggtagcggttctaccggagcagtcattggaactgctaaaataacaatgagtggcggaacggttaacggatctattttcggaggggggtatgaaggtgcatgtggcaatacggaagtcgttatgtcgggaggtactacctgctggatttatggagggggtgaaaaagggaatgtgaccggcacttccaaactgactatttccaacacggctgccattactgaaaatatatttggaggtagtgattccggtacttgtggaaatacggaagtaaatgtttccggtggaacttttgcgtatggcatatatggaggttgttttactgggcaggtaacaggactttctaaagtgatcgtgaccggaggcaatttttccggtacgatttacggagggggatttgggaaaaaatgtgggcaaggcgatagcagggatgcgaatctcggcaaagtcggaaaaacggaagtacatgtgtctgggttgacgaatggagaagtttcggtttttggaggaggtttgtatgcagatgtgacagggaatacccaagttacgataaatacaggaaaatacaatcatatatatggtagcgggtatgtggaaagcccttataatccagcccatatcggaggtgatgtgactgtcacgttcaatgatggagaaacacagatcttaggagcgataaatgatcaaattgcaggtgctttggatggcgttgttgcaggaagtatgaatatcatcataaaaggaggtacggtcacggctggccttcagtctgggaacagagcttctgtttcagagaatgtctacgaaagctgtacgttgacgtttgatggagtagggaatgaaagcactccatatgtaactcctatgattgagggttttacagatatcgtcctcaataattcggttgtcaactttaaagaacctcaggccatagagaacggaatgttccttttgcatggttttagtcttgatcccgcacatccggtaaacataagcgggaatggcaaattggtcgggaccggaatcctgcttcacaaaatcagggaggatttctcggttaacacaccgttggtaattgcaagcaatcttcccaaaaccactacattcgccaaatatgtaaagatggaagctggcagtgtcattactgcccctgtctacaaagccggaaaaacctatcgtctgaaaaaggatggcgaaaccctttatacggtaaacatcacggaaccggaccggaaactcggaactttgtctgtcgtatgggataagtttaaagagcaagatgtcaagctggaagatggcgaccaggctccggagaatacccagttgaccgttactgtcgcttccgcagatgcgggtattactgccattctcaaaaataacggtcaaacgataacgagcggtgaaaaactgaccttgtccgctgatgctgatataacggtggaaacagaagtccaaccgttggatttgtcccagcggagcaatgatgtcacgatctcgaaggatggtgatgattggaaatatacggaagccgccattacaaaaaccgctacggcagcaacctctttcaacggtacaatcaagaacacccttgccgatggtaaacgcatgttgatcgataacaccgcacagggtgttttgatcttcgagagcgcaaagatcaactcgacatcgaccgcagctccggctctgacaatcgagaacggagcgaacgtctcttttagcggcaacttggaagtaaagacaggaaatgccgaccaatacgctatccggaacgacggaatcctgaccattacaggtgcatcgacaacgatcacatcgaccaatacgaatggaagtagcgataaagggattcaagtcggcaatggtgcggtcattgtgtccgagacaaacactactcttaccacttccggcctgagtaatgaagggactgttgtcgtgaaagagggtgcggaagccaaaaccgatggaggacaggatttacaaaagacctacctggttacggtcgtcgatccgggcaacggccatacctttacggtaaaagccggagatatcgaagtcaagtctaacgacaaagttgccgataagacggtattggcagtccaggcaatcccggcaaatggctatcggttggaaacaatcactgccattcccaaagatgggctgactgtggcattggcaaacaacggaacctatgtgatgcctgaaaatgaagtgaccttcaaggctacctttaaaagtacgtatgttccgcctgccccgacttactataccgttaccctccccgaagtggaaggtgtcaccaccaatccgaaagccggtacacggaccgtcgaggaaggctattcgttcagctttgccctgacgattcatgaaggttacgaaagttcacagccagtagtaaaagccaacggcatagttgtggaacctcgtgaaagcgatggcaaatacatcatccggaatatagaggaagatacggaaataacgatcgaaggcatcataaaagacgatccgacgggcaatgcaacgattgaaggagagacaaaggttcaagctatcggttctaccctgcatatctatctcccgaaagcggaaaccatcagcgtctatacgctttccggacttctgtacgagcaacaggatgtatccgcaggaagtacgcagatacatttgagtaaaggtatgtatcttgtgaagatcggagagggtacgtataaaatcgtaatccggtaataaaaaaggaaggtgttccaaaacaccttcctcataatcttttagataaggatttatccttatctctgcccttcgccaatcatttcttcagccaacactttgtctgcatctttctgaatgttagggagttcgagtccgtatcctttgatacggtcttcacgtttcagcaacagggagattacgagtgccaggactccgaaaccagtgaagatcaacatcgggatcgtatagtcgtaggtcggtttaccgttgatctctccggaaatacaatattgatccaaaacgataccgattatatacggaactcccatcaatccccagttctgtacccagaatatcagcgcataggctgttcccaatttgttttccgggatgatctttggaacggaaggccacatggcggaaggaaccagcgaaaatgcgatgcccaacagcaggatcagtatcagagcgaccagccagttgtccagcatcggaatggagaatgtgaagtggataaatatcagcataatggaaccgataatcatgatagtggctccttttcccttacggtcgtacaagtttccgaagaacggagttaagagaatattgccgaatggcagcaaagccggaatgacaccggaccattcgggatcgataccgaatttgttaatcatcaggttcggggcatatttcaagaaggggaagacggctgaatagaacagtacgcaaaggagtgccatataccagaagccttttaatgtaataatatccaagatatcaccgaaacggaacggctcttctgcttcttcttctccggtagcaccggctgcatcttctgcatcacgtttcttgtccataactacgaatacgatgaaggataacaggccgatacaaagcagaatcaagccgatgaagatcggcatgctgatggaattgccgaatgcgcggctcaacaaaggcgtaacaccaatagctaaccctgtaccgatacgggcacaagccatttccagccccattgccagggccatttccttgcctttgaaccattttacaatgatcttggaaacggtgataccggcgatctcaacgcctacgccgaacaaagcatatcctaatgacgcaattaccaatggatatccatactccgaaccgaaaacggtaacggttgcaccgtcaaagttgtgtgatataccgaaccatttgatgaaaacgccgataagcatgatgctggtcgccatcaaaccagtgaagcgtacgcccatcttgtccaggatcatacctccgaagatcagcatcaggaaaaatacattgaaccaaccgtaagcactggtgaatttaccgtattcattggctgtccatcccagtccgccgccttcgacgggggtttgtagtaagtcctgtagcggagccatcatgtccgtgatgaagtatccgcagagcattgtgaatgcgacgagcgccagtacggaccatcttgccgtcttcgattcgctcagttttctctgaatttgttctgtcatgatatttgtttttgaattatgttatttgtctcttttcaagaacaagggtagggcgtccgccacgacgaaagtgcttccgccaataaagatgatgtcgtcttgtccggctcgcgccaatgctttttccacggcttcctgcacggaatcgcagattgtgcccgataaaccgtggaagattgcttttgttgcaaaatcttccgcaggcattgcccgttgcacggatgcttgcgtgaagaagtaaaaggctttttccggcatcaggtccaacacgccgtcgatatctttgtcgttgaccatgccgacgatcataaagaggtgcttatgccgcttcagttcttcttccagttggatgttcagatattgccatcctccgacgttgtgcccagtgtcgcatacgactttcggattctcctgcaaaacctgccaacgccccatcagccctgtcaattcgaccacatgttcgaaaccttcccgtactgcttcggtcggaatgtttacacctattgtattcagcaaattaatggcccccaatacggttgtggcattcctgaactgcacgacgccacccagttcaccgaatagctgtccgtattccgcagaatccagataccattcgcctgtatccatcagatatgactctttcagcagcccttcgtcctgagcgaaataaaccaatgtgccggctttgactgctgcgtctgcaaaaacttgtgccacactgtgccggtctatttctccgaccaacgccgggacatcctttttgatgattccggctttctcaaaggcaatcttttcgaccgtatctcctaagaactgggtatgatccaggctgatgttcgtaatgatacttaggatgggagtgatgatattggtactgtccagacggccgcccatgcctacttcgattacggcataatccaccttctcggcacggaaatagtcgaatgccatgctggaagtcagttcgaagaaggaaggatcgagagtctcaaagaaagaacgatggcgttctacgaagtcgatgacatattcttccggtatcttttgtccgtttacccgtatccgttcgcggaagtcgaccaggtgcggagaggtgtaaagcccgaccttatatcccgattggcgcaggatcgcggccaagagatggctgacggagcctttcccgttcgtaccggctacgtgtattgttttgtatgctttatgcggattgcctaagtgatcgtccagtgcaatgctggttcctaatccgggtttgtaggctgaaggtccggcattctgaaaaacgggaatactggtatatagatagtgtagcgtctcttcgtatgtcatgctgttgttatttattttcgcaaagttaggtacaaatcttttaggaaaaaaggaattacttaaaatgatagatggaataaacaagaaaaggatatccggttccgggtatcctttttgatttaacttttataattctgtgaatttaatttcttggaagtgcttcttttacaaccatctgacggccttcgtaagtggctccgttcaaatctctgattgcgttttgtgcttcggaatcttccggcatttcgacaaatgcaaaacctttagaccttcttgtatcgcgatcgatgataagttttacagaatcaactgttccaaactcttccattacatctcttaaatccgattccctaacgttatagctaaggttaccaatatacatgttcataaatataaaaataaaaaaattaataattcaataatcgaatgtaaggaagttatttatcagagatgaaaatgctcaatatgtaattgagaagatacatgtgaaaaatcaaatcgatataatctctcattgtttgttgatacaaaggaaagcattcttttcggataatgcactatgcttcccgatatatattgaataatttatttcttttgtgaaattaggtcaatacttaaggattggtagttgtcttaaatttcactatctttgtgccccgttacatgaattataatggaagtagaaaaggatgaatagacaacgtgttacttatactccgactggtggggtatgttctaaaatgatgattgtcgactcggaggacaacgtgattaaaaatgtacagatcattggtggttgccaaggaaatacacaaggtttgtccagactgctggtcggaatggaaatcggcgaggctatccggcgtctggaaggcattgattgccgcgagcgtggaacgtcatgcccggaccagttggcacaggcattgaaacagatcagtcgatgatcagcttataaccgatcccgcgtacgttcagtattttgattgattcgtctttcgacagtttatgtcttaacttagtaatgaatacgtgcaggctgcgggcattgaagaacgaatcgtctccccaaagttccaacaggacgtctttcatgggcagcacatggtctttgttttcacataggcgtttcagtatttcggattcgcggttgctcagcaattgcttttctccgcagtactggagcgtttgtgtgatggaatcgaatgtatattgtccgagcgtgaagttgctgctttcttccttacggacacttattttgttcaataatgccttgatacggataataagttccgccatgccgaacggttttttcaggtaatcgttaccccctagttcgaaaccttcgaccacgtcgttggctgcggaacgggcggaaagaaaaagaaccggtatctgtcgatccgttttccggatgtgtcggaccatcgtgaagccgtcgattttcggcatcatgatgtctgtgacgatgatgtccggctttgcttctctatatcgtgacaatccttcttctccgtttgcggcgagaatcacttcaaattcttcaccgtccaaagtgtcttttataatcatggcgagtgtcggctcgtcttctaccaataatactctgatcttatccattgtcgttaatttttaaaatgaagggtgaatgtggaacctttccccagctggcttttaaccgttacgctcccgttgtgtttagacatcatgtcgcagacgtagtacaaacctagaccgaagcctttcacgtcatgcaggttgccgctgggcacgcggtagaacttatcgaacaccctcttttggttagcttcgctaataccgatcccttcgtctgtgaccgagagagtcatttcctgggacgatactgttcctttgaggataatgcggcaggtcttttctccggaatacttgattgcattcccgatcaggttgctgagcatgttatacagatgggtacggtcggccgttacggtcatatgctccggtacttctgtcgtgatgtcgatcggtttatctgtttttagcttgaactgttctataagcggagtcagtagctctgcaacctgtatcgtttcgagatgaaggcggaaagtacttctgttctcaacggaaagagtgaggatttgttcgacccaaccggatagatgattcaattgctcccgcacgatatccagatatttcttttgcttctcgtttgtcgtactgctgtagttcagcaatacatcattggcggcataggcaatggagatcggggttttcagctcatgcgtcatattattggtgaaatccgttttaagttcttccaccgtctttagcctcagtattgtgtagagcaaataaacgaaagcgaccaggataaccataaaaagcaggaaagatgaaatcaatatacctgccatctgccggaatacaacccggtcaggagattggagttccaattcgtaataatattccggttcgatcacatgtgtgaagtggacagcgtctttccaggattcctctttttcggaagcatccgtataggcatataatacggagtctttcgcttctttccggattacctgcaggcgatacgggacggtgatgccctgtttctttaatccgttctttaatagtgtattgaattgtgcgtaattgacgggaagtaacgtgtctatcttttgatgcatgagcatctgcacgttcctttccagtgtaccgataatctgcaaatattcatttagagtttgggctgcttctatatattggattgtcgaattcggcgatgatatcggcatattatctgttgaaagggaatctttcctcttttcccatgccgtgtcttggctaaagctgaattgaggatttatctggctgtgaaaattgttattgcttagagagtccaggcgcaggaacagttccatatagtcggccatccgcatggcttcctctatattatcccacgtgcttttcttactagacacatataaacctttcagccagtatccttgtgaaatcaagagcccgacaagcgaaaggcaaataagcacagctattatcttaaatcggaggcgcgttttcatatccttttatatttacaacaaaagtatatgttccgattcaatttattgcgaatccgataagactaaataacacttagagcctgtttaaatttctctgaaataaattttgcatagccctcatcggcctgctttatctctttataggattattttaaaaaacaactgtcatactatcactaatttccttttatcaattgaatatcaatagacacaagcaatgatagtaggtatgatggatgcctattccatctatcatactatcactaaccgcctgtttaagattcttcttcacatgacttattttcaataacataataagataaacccattgacacccgggtctcgacatcattcacactcgggtgtcaagatcgttcacatccgggtgtaaaaagcctgtaaacgggaatcttcggcactttttctgcctgtttgaagcaaaataagtcacgtgtttcaacaaaaaagacggcatctcctacagaaaaacatcctcaatacaactctcacaaccaacaaatgcaaaatttaaacaggctcttagtatattagaataattagactctccggaagttgaggtttatcgcattttcctgtttccctcagtttggctgacaaaatggggtcggtaatcggataagctaccggtcttattgctccttatctcagcgataatactaaataacactccgtaagcgagtgataacacagtttctcctcggaaggcttttcctttgcagtgtcaattgaaaaacgaatgaaaatgaaacgaatactttattactctctggttttacttactgccggtaatgggatgttacaagcgcagaactggattcatggaaaagtggtcgataaagaagaacgaccggtagacggggtggctgtcgtgttgcaaacattggattctacttatatagatgcagtcgttacggatagtctcggggcattcatgttgaacaaggaagccggtccgaactatcgtttgttgttccagcatctgctgtacgagccggtttgtaaaaaaatctcgactgctgatgccggtacgataagcctgactgaaaaagattatgaactggaaggcgttgtggtaaaagccgaacgtccgcaggtcaaagtggaaaacggcgctttgagatacgacgtgccccaattgatgaaagataaggcggtcagtaatgcgttcgaggtggtgaaacagatacccggtgtgatcagtacggacgatgctgtccaactgttgggagccggcagtccgagcattgtgatcaatgggcagttgaccacgatgtcggtcgatcagttagtcggtttgctgaagacaattcctgcttcgcgggtatgtaacgtagagatcatgtataatgcaccagccaagtataatatcaaaggagctatgatcaatgtcgtattagataaggaaactgtcgaaaagaatactttgcaaggagaaaccggtgtcgattatttgcagcgccattatgcggaggggaaagtccatggcaacttgctttactccacatctcgtttcaatatagatttcttagccaatggggctaagggacggaactatatgggagaggagatccaggccctccataccctgaaagatcaggtaacggaggtcaaccaatcgggacgtggcacccggagcggcatagatggaacgatgcgtttaggtatggactatactttcaaaaatgacgacaggctctctgccgcctactatcttacggccggcaaatccgatcttgagcggacggccgttacaaccttccaggcattgaaatccggacagccggtggaagaacgcctgagccgtacatacatagagggaaacagtgcgttgcacaatgtccgtattcaatatgacggtaactccggactgatggcgggtgcggattttacacgttatcattcacccggcttccagacatttgtcgatcaaagccatgaaacgacagtgacggatatgcagaataattccaagcaggatatttcacaaggagcactatttattaatcatagccacacttttgaaaccgggtgggcactgaattacggtgtccacggcggtttcacctcttcgaagacttatatcgattatctatataataaaggtaacggctatgaatcggctcttgatgaacttgaaaataaccgccagaaagagtatagtggaaatgccttcttggaggtgtccaaggatttcggttcgcatttctctgcaacagcttctctgaaagttgaatactttaaatcggattatacctctaacgggatgaaatccacactttggaatgattggaccttattcccgaatgcgacactcagctatacggtcaatccgatgcacatcatccaattggacataagcagcgacaaaacctatccgtcctattgggatgtgacgccgcaggaaagcccgatcaactcttattccgttatcttgggcaatccttccctgaagccttaccgttcttatagcgggcagttgatttatatcctgaagcagaaatatacgattctggctttttgtgactatgtgcccgattatttcgcccagttgccttatcagaatacctcggaactgaaaaacgttttccggtatgagaacatggactaccagttgcaattcggtgtaggggtgatcgttcctttccgggtcggcgagttctggaacagccaagtgactttgtccggtcagcgtatgcaggagaagttggaccattttcatgatctgtctttccataatgagaaatataccgggcagttcaagatggataatacgtttaccctttccaagtctcgtccgaatttgaagctggatttgaatggctatttcgttaccggagccgtgcagggaatctatgatctcggtcatctctatgatgtgtcttctgcattgaaatggcagtttgccgacgatcgtgctactctgattctgaaatgtaacaacatcttccgtagcaatatgcctcatacgatggaaatcaaccagtccggccaatacagccgcctctggaaactggacgaccaacgttgtgtaacggtttcttttgtctggaagttcggcggttataagaaaaagcaacatgaagcggtggatgcttcccgattcggcaaatcgatgtgatctgttcttttgacatttagatagggaaaagagggttgaacatgcttgtgtattattgtcgtattctaatttgagtgtctctcaaatagcctacgaatcaggctatggtaatgttccatactttatcaagcaatttgaaagtataacccggcaaactccaaaggagtatcgtatttctcttttgcaaggttcggagaaccggataaaaagtagtacatttgatgcccgataacaattagaacaaatggcagaaagaggaaaaaatacaggaggaaaagggaggcagaaacaggttgtagtacccgatatgggacgtttgcaaccacaagcccgcgagttggaagaggcggtgttaggtgctctgatgcttgaaaaggatgcttactccatcgttagtgaaatattgaaaccggagagtttctatgagaaggcacatgagaaaatttatgcagctatcgtagatctggcgatcagccagcgtccggtggatatgttgaccgtcactgagcaactgaagaagcgaggcgaattggaagaggtaggtggcccgttctatatttcccagctgaccagcaaggttgccagtagtgcccatatcgaatatcatgctcgtatcatcgcccaaaaatatctggcgcgtgagttgatctccttcactgctatgatacagggcaaggcttttgatgagtcgatcgatgtggaagaccttatgcaggaagcggaaggaaagctctttgagatttctcagcgcaatgtgaagaaagatgttacccagatcaatcctgtcatcaaggaagcgatggttatgcttgagaaggctgccaatcaaaaagaagggttgagcggtctgcgcactggtttcgaaggattggacaaaatgacgtccggatggcagaattccgatcttatcatcattgccgcccgtcctgcgatgggtaagacggcttttgtcctttcgatggctaagaatatggcggtaaaccataacacgccggtggctctgttctctcttgaaatgagtaacgtccagcttgttaaccgtctgatcgtgaacgtatgtgagattccgggcgagaagatcaagagcgggcgtttggaaaactatgaatgggaacagttggactttaagataaaagaattgtatgatgcaccgatttatgtagacgatacgccgagtctttcggtattcgaactgcgtacgaaggctcgtcgtctggtgcgtgagcatggtattaagatcatcattatcgactaccttcagttgatgaatgcaagcggtatgagcttcggcagccgtgaacaggaagtaagtactatttcacggtcgttgaaaggattggcgaaggaactgaacattccgatcattgccttgtctcagttgaaccgtggtgtcgaggcacgtcaaggggcggaaggaaaacgcccgcagttggccgacttgcgtgagtccggtgctatcgaacaggatgcggatatggtttgttttatccaccgtcctgaatattataagataacggaagacgaacgtggtaattccttgatcggtctggcggagattattatcgccaagcatcgtaacggtgcggtcggagatgtacgtcttcgtttcaagagcgagttcgccaagttcatgaatgtggacgaagatgttccggttcgcgagttctcctctaatatgaatagttcaggcccgatggaaacaatgccgcccataccaccagccggtaccgatttcttggctcccggcaataatgaggttccgttttaataattctatcctcttttcaaaacataggtgtttagtataaataattatttagtttaatggagtgatatggcaatttgtgttttcagcaatttaatgcctttttattctcttcattaaccggattctttccttccggtgtgtagagatggtcgatgcgagaggcatatgctttttctattttcccgcggacgatcttcatcgtgctgttgaccatgccgttctgttcggtgaaaggctccggcaggatagcaaaagctgcaggcagccagcgatcggggaaaagggcggacaggtcgcctcccttgcggaaacggtctatctgggattggatgatccggattgcctcttcgcgtcctttatcggatgaaagatcaagatactggtgcgtcagatgcttcttcagccggtctttgttagggacgacgagggcaacggtatagggactctggttgttatacaggatcagctggtcgatgcaggaagaatgttcgacgagtgcctcctcgatcccttccggactgtatttttccccgtcactaccgatcagcagacttttgaaacgtccgaggacgtagagcagactgtcatgccccatatatcccatatccccagtgtagagccacccgtcgcgtacggtttcggcagttgataccgggttcttccagtagccggccatcacattctcgccccgtatgacgatctctcctttttcgcctgccgggagttcttttccgtcggcatcgcatattttcaggtcgagcggacggaccaacatgccgctgctgccgaaggtatgccggtgcgggccgttggtggaaattacgggagtcgcttcgcttagtccgtacccttggtacataggaagtccgattgcgtagtagaacttttgcaagtctttatcaagcaatgcgccaccgccgatgaaaaacttcaattgtccgccgaagttttcacggactttcgtgaaaagcacgtggtcgaacagactcacgagcggtttcagcaggaatcgggcaccacgtcccttatcttctccgccgtctccgttatagatgtaagccactttgagggcaaagtcgaacaaacgggttatattcttgccctgggcacggatgccttgttcgatattctttttgaaattcttggccagtgccgggacgctcaggatcaagtagggtttgaactctttgatgttgaccggaatgttctttaatgtttccagccctgtccgtccgacttgtacagtcgctacggatgctcctttcgacatgaagatatagaaaccgaccacatgcgcgaaacaatggtcgagtgggaggattattaatgtgcgccatgtatcgtcaatatcgacacaagatagggcttgctccacgttcgccgtatagttacggtgtgtcagtataacgcctttcggatcggccgtcgtgcctgaggtataggtaatcgtcgcatagtcgttattctgtaaggattgtccaacagcaaggaagtcttccagagaatgagatgccagatattctttccccatccggaatacttcggaccaggatatttctttttctttatattccggcagttcgtctatcacaattattttttcgactaaaggcaatttatccatgatagcccgtatctttttgagttggttgccggaaaccaggatatatttcacatcggcatgcacaagacggaacagcaggtcgttcgcttcttcgagcttgatggaaagcgggacgttggtcgcgccggcatagaacatggccagttcgccgatgatccaagcattacggccttccgaaaggagcgccatattgtcgcccttcttcactccgagagctatcagtccggcaccggcagcgtagacttgttgctgaacttctttataagtggtcggttcgaaggcatccctggttttttcccacaggaagggattgtcgggatattgttttaccgaattttcgaaaaggtctataattgtctttttcatattatttatttttgtatttgtactttcccgatttcatccaggtaattacaagccacctctaccgttggtacattcttgatcacgatactgcgttttccgttctgttcgcgaagcgtgcattcgcgtggatgcttttggatgaagccgagcagcttgtcgaaggcctcgctttcgtagtaaggactttcgggattagtgacgagaaaaatgctcatctgtccttttttcagaatgactttttccatacctaacgtctttgccatacggcgaaggcgaacgacacggatcagttctttcccttctttcggcacttttccgaaacggtctttcagacgctcggtaaaagcaagtatatcacgctcttcctccatcttgtccagttcacgatagagggagacacgttcggagtcattcgggatgtaggtcggagggaacatcagttccaaatcgctttcgatataggtttcacggacatattcgctaccggtgtcggggcgattttcggtagcgttggaatacaggtcggcaaattcttccgctttcagttcgtcaacggcttcttccaggattttctggtacgtttcgtagcccaagtcggcgatgaaaccgctttgttcggcacctaacatattaccggcaccccggatgtcaaggtcctgcatggcgatatggatgccgcttcccaactctgaaaaattctcgatcgcctgcagacggcggcgtgcttcctgcgtaagacttgacaagggtggagagaggagataacagaaggctttccggttacttcgcccgacacgaccgcgtagttgatgcagatcggacaatccgaactgttgtgcattattgatgatgatcgtatttgcattcggtacgtcgatgccactctccacaatgctcgtggcgatcagtacatcgtattcgtaattgacgaaatccagaatgatcttttccagcttctccggttccatctgcccgtgaccgacagcgatacgggcatccggcacttcacgtttgacaagcgcttccatttcataaatattttggatgcgattgttgatgaaaaaaacctgtccgttacggctcatctcgaaattgatggcttctcggatgatgtccgggttaaaacgttctacctctgtttgaaccggatagcggttgggtgggggagtcgtgatgctcgacaagtcacgggctcccatcaacgagaattgcagggtacgaggaatcggagtggcggtcatggtgagcgtgtcgacgttggctttcagctggcgtagcttctctttgacggatacgccgaatttctgttcctcgtcgataatcagcagaccgagatctttgaatgtgacatcttttccgacgattcgatgggtgccgatgataatgttgatatttccttctttcaagtctttcaaagtttcccttatctctttcgccgtacgtgcccggctgatatattcgattcggcagggaaaatctttcaaccgttcggaaaatgtttgatagtgctggaatgctaatactgtagtcgggaccagcacggcaacttgcttgttgtccgaaacggctttgaaagcggcacgaatggctacctccgttttcccgaagcctacatctccgcaaatcagtcggtccatcggacggtcgttctccatatcggctttgacatcggctgttgctttcatctggtcaggggtatcttcgtagataaagctggcttccagttcgtgctgcatgaaactgtctggactgtaagcgaaacctttttcctgttttcgtttggagtagaggagaatcaaatcgcgggcgatatcttttacttttgacttggtgcgttctttcatcttctcccaggcccctgttccgagtttactcagcttgggcggttccccactgtccttgcctttatacttggatagcttatggagagagtgaatgctgacaaatataatgtcgttgttctggtagatcagcctgatggcttcctgcatttttccgtttacttccgtacggactagcccgccgaattgtccgacaccatgatcgatatgtacgatataatcgccggtcgtgaattggttcaactccttcaacgacagagagagttttccacttcttgctttatcgcttttcaagttgaatttatgaaagcggtcgaacaactggtgatccgtgaaaaggcagacacgcaaggtctcatcggcaaaaccttcatgaatggtcttgttgacggaggtaaaaggtatgtcgtctccccgatcctcaaaaatggccctgatacgggttgcttgcttttctacatcgctcagtatatataatgtatagccgtcttctaaatatttatggaaagactcgcttaccaaatcgaaatttttatgataaatcggttgtgcttccattgagaaagtcagggtggcatcggctactcccataggccgcgtaccaaaatggagccggcagaaaccaagtgccgcatgtagaaaatcctctccggtaattaatttggcccgcagttgctcgatgttggcaaacgattcttcgtccccgatgattggttcttcattccagatactgccgatacgttcttttacccatgccatgtctttgctagcgagcagtgtctcggatggcaatgaatctagtaaggatgagttggtccggtttccttttgtcatttcgggcacgatatagatgctgtccagtttttctttggatagctgtgtttccacatcgaacgaacggatcgtctctacctcgtttccaaagaagtcgatacgatagggaaattcatacgagaacgagaacacatctaagatactgccgcgcatcgcatactgccctggttcataaacataatctacctgctcgaagccgtattcgtccagtacgtcagaaacaaacatattgtccaacctttcgccgacactgatcttcagcgtgttttctttcaagacctcccgtgaaattactttctccgccaatgcttccggataggtgacaatgatgaagggagcagtcggatcctgcagcgtgctgagaacttctgtccgcaggatttcgttggctggatccacatgtccgtacttgatagcacgtcggtaagcagaaggaaagaaatagattccgtcacctcctgtgagttgcaccagatcgtgataaaagtagccggcatcctctaggtcattcaacacacacacataacttcctcttctttttgaaaaaagagaagctattgtcattgcggcccctgaaccgttcagtcctttcagaaatatattgcgggacgttttgttttttaacagggtatttaatgccgccacttgcggatgggcggcatattgttttagtaaatcttgtacctccaacggatgaattgaaaattgataattatatatgcgcaaaattacggaaaatgttacaataatcttcctaaaactaatgaaaatatctaccttcgcgcttgggttgtcaattgaaatgagcaggatcttctcattttcaattctcaattctcatttttcaattaaacagtggattatgtcagacagtattgttaactgaagcatattctttgtaatgctaatctcccataactgattattaaaaaggttattgtggctgtttgagatataatgacttaggactatttgaccagtttttacctccttacattgctggtttaacatggaagtcttgccagaataaaaggctccgtttacaaatagtttacagtgatggcttatttcaaagtttgtgtcagggggaaaagaaaagataatacatatcctatttatatcagggtaactcaccttcgtcaagtaggatatatcaagacaaataaggtatgcaaagctaagtttgtcaggaatggtgatataacagacccttatatcattaaagacgtgtatgtccaaatagaaacttatttggatcgtttgaatcgtgtcaatacggaaggatggggtttggagagggttatgaattttcttaagaatgaccgggactctatttcgttttccgactttggccgagagtttatcttgaaaatggagaatgaaggccggggaagaagtgcgaaaaactatctgttagctcttaagagcatggagagttacttaggtaaccgaaatatatctttttccgatataacgtccttttttctgaaggattggatttcttctatgaaaaacagcagacagaaaaagaatgcctatccgaattgcgtgaaaaccatgtttagggcaggatgcgataaatataatgactacgataccggtgagatgcgcatcaggcatgatccgtttcgtgtggtaaagatacctcctaagaatattgcagacaagaaggcgctgccggtagatgtcctcagacgtttttttgatgttgatattacctctttgaaaccaagtaagcgaggtatgccaccaagagcatatatagccaaagatgtatcattgttggtgttttgcttggtcggaataaatacagtggatctttacaatttgggcaaagattgttataaggatggaaaactctgctataatagaatgaagacaaaggggcggagagctgatgaggcctatattgagatagaggttccggatttagtaaaacctttgtttcttaaatatcaaggaagaggggactggctgtttaatttcaatgaaatatatgcttcggataaaacttttaatgattgcgtgaatagaggaataaaggacattgtgaggttgggtggtttgcctcctgtttctacatattcattccggcattcttgggctacaatagctcaggttgtttttgaagctgggttagatgttgttgggttatgtctaaatcatgcgtctccactccgggttacggctggttatgtaaaaacagactttagtatcattgatcgtttaaatattaagatactgaggtatgtctttgaagaaaaaataaaaaaaggcggaaataatttgtagattaagaaaaagcctctatatttgcggttgaaatagcgagttggattttgaatgaaagtttgagatccaactttttgtgtttatatatattgtcttaaactttcttgtaaatatccgataaataaccatttacctggtgccttccataaaattaggcacaatgacaatatctgtttcaaaaaatatgttgcttgcgaaattgcagcaactttctcgaataattccgtcgaaatctacgactccgatagtatgcaactacctgttcgaaataaaagatggacggttgtttattacgactgccaatgatgaaggcaggattacggccagtttggaatgtatggcagaggaagatctttcaatctgtgttcctgcctccattcttgatgggctgaaaacattgccggagcagcctcttgatatttatatcaatccggacaataaatcgattcttattaaatattatggaggtaaattcgaggtcgtcggatatgattcgaagcctttcccgcaaaagaaaaagacagagattcttgacgaaatccggactacggcggaagaattcaataacggtatctccaaagtgatcaattttgcagctgcagacgaactgcgccctattatgaactccgtatctattgaaacggctccgggagaaatcatctttgtttcttctaatggacatgggcttggtttgtttaagagaaaaaaacaatgttgcacagagacctgttcggtaatcatcagccgacagatcgcatctgttttgaaagggctgattccgttatctgaagaagaactaacaattaaagtaggaagcgattggtcggaaatctctttcgaggattacgaaatttcttttcgtaatgtggaaggtcgttatcccaattggcgggctgttgttccgaaatccaacaatcttgaactgaaaacggataccaaattactattgggagccataaagcgcacttctgtattttcaagtaaagtatcatgccttataaagttgagtgtccgttatgataagcttgttgtatcggcccaggacttggattattccacttctgcggaagaaaccattccggtagaatttggagaaagggagtttattatcggtgtgaaagcgactttgatacaagatatgatttcttgtattgacggtgatcgttcgatactttctttcggcactcccagtaccgctattctcattgccccagagaagcaagccgagggcgaagaacttacctatttattaatgcctatgacaatccagtaagttatgaaagagttcaaagatacaatacagaaatatttggagcaacgagttgcagaagatcccttgtttgctcccaagtttgaaaatcctaaaaagaatatagatgaatgctgtcgttacattttaggagaagcccgtaaacggggagcttctgtcgtaatgagtgatgcagaagtctttgggatggccgtacattattatgacgaagagaatatcaagatagaaaaagtttctgccggttgctctatttcttctaatcaaaaggtagagttgacggaggaggacaagaatgcggcccgtaaagcggctatcaaacggttggccgaagagcaataccgattgctcaaaaagaagcctgcaaagaaaaaagcagatgtaaatgtccaacaaatgagtctgttttaatatgaagccgagaacgaaattggaaaaacgggtgacggagttaagtggaaagctgcctgccatcacgaaggaacagaaagactgggccaaaaagcatctgtttgaccattttgcctacaaatgtaaggatgagctatggtgttccgaatgtggtaagatgtgggtcaatacgagtaaagataaattgggtgacaaaatcgaatgcccttattgccatcatcaattggacgtaaaggttagccggaagcagaagatccgtgaagaggcgtatatgtccatcctgcaagtgaaaggcgggttccaggtgatccggcatatactatgctggaaaaatgttcggaaggaaacttctccggtgtattatgattttacagaagtggttcaagagtggattcgtgaagacggaaaacgtacgatcatagcccgaccgattaatatgggaggtaacggatttgcgtatagttcacctctcagcatcaaaggagaatatggaagtaatccatatctattacggtgatttgtatgcgatatatggagagctttatccaaggaaagagctgctgccggaattgaaaaaacggggactgaatcgatggttcccggatgtaaccccgtcaaaattgatacgtgacttgttgaaaggtggaaacgatgtggaactgtgtctcaagaccgggcaaatatccatgttgaaacacatgtataaaactggcttctcccaacttcgctataaaccgtcgttcaacatctgcaaccgcaaccattacatcattaaggacgcttctatgtgggaagattatatgtctttactatcttatttcggcaaagatatgcgtaacgcccactatgtctgccctaagaacctgaagactgtacatgataaactactaaagataaaacaggaacgtgaagccaagttgagacaggaaaggaatcgagcacaagctatcagtaagcgcgaaaagttaatgaaggatatagccggcttctacgagcggatggaaaagttcttcggattgagaatcgaagaagaggatataatcatccgccctttgtaaagtgtcacccagttttatcaggaaggtaaggccatgcaccattgtgtgtatcagaacggatactacaggcggccggaatgcttgatattgtcggcaaaggacacggctggaaaacgattggagacgatagaggtttcattgaagacactggatgtcatccagtcccgatccgtttgcaatggtgtaagcaaatatcacgaccagatagtaaagctggtgaagaagaatatgaacctgattcgtcagaaattgatagcataaaagatttagttgaatggaatatatagaatttctaagaaataagatggctatcagccatcaaacaggatttgaaattaattcggaagaaattaccccgacattataccctcatgtaaaagataccgttcgttgggcggttgccggtggatgccgtgctatattctccagcttcggtatgcaaaagacagtcacccagctggaaatacttcgggtaatcttgaaccataaaggaggcaagggattgatcgtttgccctaagcgtgtggtagtcgagttcctaacacaagcggaacaacacttgcacatgaaagtaacctatgtccgaactatggcagatgtgatgatatgtcctaccgacatcatggtaacaaactacgaacgtgtgcgtgatggtgaggatggagtgagaatagatccgtcctattttactgcaacttcattggatgaagccagcgtgttgcgcggattcggcaccaagacctatcaggagtttctaccgttgttctcgggtgtcccttacaggtttgttgctacggctacaccttcgccaaacagatacaaggaacttatacattatgctggttatcttggtgtgatggacaccggacaggctcttactcgattctttcagcgagacagcacgaaggcgaataacttgacactttatccgcataaggaaaaagagttttggttgtgggtatctacatgggcgttgttcctaaccaagccttccgacctcggttatccggatactggctatgagttgcctgaactccgcgtacatgaagagattgtgaatgtggacaattctacggctggagctgatcgtgacggacaggtgaaaatatttcgtgaggctgctctcggacttgctgacgcggcaaaagaacgccgagataacatgcaggaaaagattgcccgtgtggtagagataatcaatcgcccggaaaacaaggacgaccatttccttttatggcatgacttggaagctgaacggctggaactatgcaaagcgattccaggttgtaaggctgtctatggttcacaagacgatgaagaagccgacaaggtgatatccgacttcaaagatggccggctgaaataccttgcagctaaaccggagatgcttggtgaaggtctgaacttccagtatcattgtcataaagcaatcatgttcattgactaccgcttcaacgataagttccaagcgatagcccgtatataccgctttatgcagcagcatcccgttgatctctatctggtctatgccgaaagcgagggtgaaatatttaagagcttcatgcagaaatgggcacaacaccgggaaatggtcgcaaatatgactgatattgtccggcataacggtttgttcggtttgcaggccgaggaaaagatgatgcgctggatgttcgccagtcgggaagaaaaatccggtaagttgtggaaagcaatcaataacgataatgtattggaatgtcagaagatggaaagtaactctgtagatctgatcgtaaccagtatcccgttctcaaatcattacgaatacacgcctacatacaatgactttgggcacaatgaagataacgataagttctttgaacagatggattatcttacaccagagttaatgcgcattttgaaaccgggtcggttggcctgcatccatgtgaaagatcgtgttttgttcggcaacgccacgggggacggtatgccaactattgacccgttcagcgaaatgactgtatttcattacatgaagcatggattccgatatatgggacgcattacggtcgataccgacgtggtgagggaaaataatcagacctaccgtttgggctataccgagatgtgcaaggatggttccaagatgggaatcggatgccctgaatatgtattgctttttcgcaagttgcctaccgatacctcccgcgcttatgccgaccagcctgtcacgaaggacaagagcgaatactcgctggcccgttggcagatcgatgcccatgcaagttggaagtcttccggcaattcattgttgtcatacgaagatatgaaaggtgctggaatagataagattcggcatttgttccgtaactacgaacgtgaacatatctacaactatgaagagcacgtttcatttgctgaagagctggatgcatacgggaaactgccaaagacatttatggccgttgatccggtaagcaaaaaggattggatatgggatgatgtggttcgtatgcggacgcttaacaccaaacagtcgcaaaagaaacgacagaatcatatttgccctcttcagttggacatcgttgaaaggctgattgaacggtattcaaacaaaggcgaattggtatttgatccgtttggtggtattggaaccgtcccttattgtgctgtcaagttaggccgtagaggtctttctacggaacttaattatgactattggaaagatagccttacttatttgcgtgagattgaaatggaagtcgaggctcctactttgtttgatttgatgggaattcctgaaagaatgactgtataaatatgccaagaattagaactatagtaccggaattttgggaagatgaaaggttttcgaacgtatctcttccggcttgtctgctttatataggcatgaaaaactttgctgatgatagcggtgtcattttagctaatgaaactatcatcaagtcgaaagtctttcctgcccgcgaagatattcgtaagcagcaggtttctgggtggctgcaagaactgattgaaaactctatccttgtaccttttacattcgaaaacaaaagctactacgtgatggacttttccagtgagcgcatcgacaaaccgcaaaagtcaaaaattcctgcagaagtaatagaaaacgttctttcgggcaaaaaacaaagcaattcgggaacattcgcgaataatcccgaacagtcgggaatgttcgaaactactcctgctggaaaggagagtaaaggagaggattgtaaaggagaggagggttatacgcgcgcaggcacgcgcaaccctgaccccgaaccggagaaacccaagaatgaaaattttgaaaagttcaagcaatggattgctgcgaatgctcctaatgtggctaaattgaaagagccatttacggaagaacaattcgaacggataaagcgagatttcccgcttcagttaatccaggacactcttgtctcgatgcacaactatcgagagttgctcaaaaagtacgttagtgcaaaccttacgttccgcaaatgggcgaaacgtgatttagaaaaatatcaagatggacaaacaacaagcaatacaactgttgtcacagatagactcaacaacaggcgtacttcctccggaactgatgccgaaaacaagagacgcgagcgtgagcatcttgggcaccttgccgatgccatattacaacagtctgcggcccaaaacagtaaatgacgtgtttgatagcccaagctgctctatagcggctatgaacaaagaatttggagagacgcatcttcgtggatttatggtaaaagtcttgaatgatttgatagattttttcaatgtcggaaaatcgatcggagcggtgcaagtcgcacaaacagttgatctgattattgatgaatactatttctttaagcctgatgatttcaagctatgttttaatcgggcgaaaaagggattgtatggaaaggtttatgatcggatagacggggctgttattttaaaatggcttggccggtatgagaaagaaaggggggctatggccatggatgatagtatcaataattccaaaagctgggatataccggaaggcgataggacttctaaaacattggaacaagcgtaccatgagtttaggaagtatgattttgaacggaaatataaggggtaaatattaaaaaaacatcaataattaaaaagaagtaaatatgaaaagttatcaatatgaagaaattgtcttttggctatcattcatagcctacctgattagccacatagccagttttgatatttgggtacaaaatctattgcttatcaatgctcttataaatatgtgctgtgctatttattatgcttataagcatagaaaagacgatgattaaaaaatatgaatatagatactgaatttaacgtaggagatagcgtatgctatctgagtggggatgacattatccatacaactataagcaaaataatcatcgaaatatcctatactgatgatagttttcttatggtttataagctgtcagatggacttagtgtacccagaaataattatcccaaatgggataaaagactttttaaagacaaagagagtttgataaaatatttatctgattcataacaaataaacagacaatgttacaggacaaaataaactactccattgcactgctgcgtaagtgcgagaagatggcgcttgattatgatccggagaatggcttttatttggccttttccggtggaaaagatagtcaagcactttatcacatcgcaaagatggctggtgtaaagtttaaggctcacatgaatcttacatctgttgaccctccggaagtcattcggtttgtgaaacagaactatccggatgtagagctgataaagccaacgatgtcggtttatgatatggctctaaagaagcactttattccaacaaggacgtttcgctggtgttgcgctgaatttaaagaaatgtccggtgcagggaaagttaccttgatcggcattcgtaaaactgaaagtgtgcagcgttccaaacgtgaagaaattgagattagcggccgtaaattcagcgggaacttcgaccaattttctgagcataaagaaaagatggttacttgtgttaaaggtaaggacaagattcttgtttctccgattatccattggacagacagagatgtgtggggctttctgaatggaaatggaatagaacactgttctttgtacgatgaaggatataagcgaataggttgtattctttgcccgatagcaaaccgaaaacaaaagctgaaagatataaagcggtttcctcatgttcgtaggaaatgggtacaaacaattcaaaaactcattgatgccggatatatcaatcacaattttaccgatgcggaatttggcttcaattggtggataagcgacaagagtttcgatcagttttatgcagacgaagttctacaacagaaaattcaattttaataagaaatgaacattatggataaaacgaaatgcatcactttcgattcggcagcgcaagaagcattgccggatcatattaaggctaaaatgaaagcagctcgagataaggcgagattagaagcatatcataagcaatgcccttgctggaacagacacaacgatagttgctatgatgataattgctcttgtgatagagattgtgagtatatgaaaagtttcaattaaaaattaaaaaacgaggttgcccccttaggaacagcctcgttataggaaaatccaaactacttatagtatttttctctaatagtagttttaggatgttttttagcgtaactttcagttacatacaagaaggtgtgtcgtaatacccgatgcgccttcttttttttcgttgactataaaaatcggctcatttttttaagctgcgacattttgaggatttcttcgatttatgtgttcccagcatctaaaaacagcagctgtaagctcataatacagtctaatcaaccaatccataccttctttagccatttttgcacatatcttttttatattgaaggcaatggcaaagaaggcaaaatccatgaagaccttatcctttccaaaatggcggaaacgtttgtaattcatattgtttttaatttgtccgaacacggattccggttctatgcatctctgtcctctgtgtttcagcccttcctcggagcagagctgctctttggctttttgcctgtattttctgagcctgtgattcagttctatcgtcctgtttccttttgctttaaaacaacggcatcttagcggacagccttcacatctgacggctctgtacctggcattttcgctgacatatccggatgtggttttcacatgtctagtacctatcctccgcatcctttgtcccatagggcagatgcaaaagttatgttcttcattgtagtagaagttttctgccttgaacggatccggttggaatctcggccgctgctccatgtggaaatagttgtatttgacgtaagcttccatgccgttctctgacatgaagcggtaattctcctcagaaccatagccggaatcggcaaccaccgtatgagccatccggtcatacctgtttgaaaaagattgcaggaaagggatcatggtcagtgtatccgtagggttcgggaagagtgcaaaatcggtgatgaactggttctcggtgccgatctgaaggttgtaaccgggcttcgtctgcccgttacgcatggcatcctccttcattctcatgaaagttgcgtccttgtccgtcttggaataggaattcctctcttgcagcgtgtccagatgactgtcgtattcctggagtttgtccctatgttcttccagctccttcagctgtttgcgtctctttttcagctcagtcttttcctccttggtggaaggctcgggaacctgttccagcacatgacgtaattctcccgccatttcggtcagcatggccggagtgaactcaacctcctcattactttccgaatacttttcttgggcgatgacatcgtctatctgccctagcaggacatgtatcttcttcatcaggcgctctcggttccgctcaaccgtttttcgccaaacgaaagtatacttgttggctttggattcaatctttgtcccgtcaatgtattccacgttcaaactgataaatcctttggaagagagaaggagtacggtttgggtaaacacctcgttgatttccttcttcacccgattgcggaaacggttgatggtaatgaaatccggtttctcatatccggcaagccagatataatgaatgtcacgatgaaggagcttttcgattttccggcaggagtagacgttgttcatgtaggcatacagaatgaccttgagcatcatcttgggatggtaagagctgcggccgcattccttatatagcttcctgaaactttcaagattcaggccctcaaccagggcgtcaaccatgcgcaccggatcgttatctgcaatatcctcatctattctttgaggaaaaagcactgtttggttgggattgtaaggacgaaaatgtatctttgccatagtataaattcttatgcctaaagatacaaaatcttcaggttataacaaagccccagcttgtgaaagtcggggctttgggcataaaaaagaaggtgagaattttgacacaccttcaataaaatttggagtatttcatcttgatattattttaaaattcataacaaatttaggggtaggtgattcataggccaaatttgagaagaatatattaattaactcatgaattattattatgacactataaaaaaataacaagctatgacagttggagaactaattgcagaattggaaaagtacgataagaattacgatgtaacctatggctgcccggcggattctataaaagtggctaatgaatgggctgatgatacacatacattgggactaacaaaaaagggaatgaagctatatctacaggaggaagaatgagattaattacaaaacaggttgccaagctggaagaatttgaagccagacgggaaaggctcgttaatcgtgttgctaagctcgatttaaaaatcgaagagcaaaaagagaaaatttcccagtactataaaaaaacaaggaattaacgttatagctaaaaaagaggagatattgccagtatctcctcctgcttaatttaagcatcttcaaccttagtcttgattcgatcatacttaataaagcctaagtttatacgaaaccaagaatgtgtgtacactgttgcagaggttgttttttgaaaaggtttgaaagtttctgaaaatttattggaaataacccctgctattattgataacaggaactctttcataacttttcatgatttttaatttaacaacagctcatatccagttggacttgaaccaacatatccagttgtaagatggagcttctccattcggccatggatatagacacatgcaaatatagtgattaaaaagaaaaaaacctttctcccgggagaaaggttaaaaaaacgagtcgaactcttttatgctaacaggccggcaatcgctaaaattgtgaacaatagctttatgatctcttcagcagaagcatctatctcaacacgtggattaaatagaattttcatgagcaacatgatttcaagttcgtgactacctatctctttgcttagataatctaattacactctgctaagtgcaactggttgcaaaagtaataatcaaatagtatttacaatgaataaaaaataaacaaactacaaattaaatgcgggctctggataaagggttttcgtacagagtggttcggtaccgaagagaaatggattccgattaggctcatatcacgaaagaagtgagttaagaaagtccttggtaatccaaagggctttctttctgttctttatatcttatatgaaactaagatatgaaaacgcaaaaatgtatagcctgtggctgggaaacagtttctgtgatcaaaacagaagaaggatatatctgctataactgttactctgataaaaagaaccctccaaaacaaaagcaacaccatgataacgaagaagctcggattcagtcggagtttttcagcaaggttcctttattctttcctaatttgccggatcgacttctttttgcagtcccgaacggtggcagccggcataaaatagaagcggctaatatgaagcgccaaggcgttaaacgtggagtggccgatgtaatccttcagataccgaaaaagggatatgcttctctttgtctagagttcaagacatctacaggtaaacagtctgcagagcaaaaggaataccaacgccaggttgagatggcgggtagtaagtatgtgattgttcggagcgtggaacaggctatccgggaactgcaactgtatttaggttaatagatttctctgttatattttagaataaattcttgtctgattaatggatttgtttgaaaaataaatacttatagaaactttgaaaagtttcgggtaacgatttggagattgtgctaatttcagtattttacagtctcatactcatgagaaaactttttcgaagtaaaggtaagaatattttttgaataagcaatggcttagtagaaaataggaaaaattacatttcttgtattttgccgccaaagaaaacaatcacatatatcaggattcgaatttagaaaagcaaagatcttaatgagaaactagactgataattaagaatctctggaagatgtaacaacccgttacacattcagagattttactgtgaatattcattgattacggaaacgctatgtattcgcgcatgttgtttcggtaaacactgccgtaaaaatccgcattatagacggagacatgcgatcccagcgtttgttggaacaggcttgtataaaggtcccgtaatggaatttccggattcttgtctatccggtccaatagcacgaaggtatagtggtctgtcgagaaatccaaattgcccgaagctccgctgaatggcggagtttccccatgctcgatgctttcgaatatgcggctcatggaaccggccgtccacatgcctttcccctcgggttccaggttgagcagggaggctatcgcctcattcatctctaccccttggacggttgcatattgtgaagcataacaagccaccatcacggcatcatagactgccgattccccgagcgacggcttttctccgaacttcacctgataagacatgtcaaatcctgtggtcgggtctggcacactggcaatgccctctatcccgttcgacttgtcgccaagcgttttaaccaattcagatgaataggcgatgtctgaaaagagcaaacgtcccttgaaaccggactccttatatagttcaaccatcctgcaagcctcttttacggttgagggagcgcatatcagacaatctctcccccccctctttagccacgaagcggaacttgtccggcaattcttccggccggtagccggctacatccaccggttccaatcccaattcaaccgcttggaatgcaaacctgtcctgaaaagtctgtccgtaaatgccatggcttgccagcagtgatacccgtttcgcctgataccgctcggctttggccaaaagaagttccgattgggtgatgtcgcttttcgccagacaccataagaagccgcgttggccgaacgtccgttgcaattcttcgccggttgagaatgtaaacatgggcttgtaacttcgggcacatttgcttgccacaattttcgtgttggcggtatagtgggcaaaaccattagtacactttttttcgggcgaaaagtaaaaaagttattttattttcagtactgtttaaatgatacttgaatggcattcaaacgaaacaatcttttctactttcttcctccaaaagtgtaccgatggttttgcacattatagaggaaaagggattcggatatcttttcaaatgattagaagattttgacggatgtaagtaatcctgttattggtttttattgggtgaaaagatgaaaaagtagtattaagttcagtatttttatcgagttactcgtttaacttataaaaagtgaaaaatgaaaaaacgaaataatattgttagaattagatttttgtcggatttcttgctcctttacgggttggtggcgctttgctactctcctgtattcttcaacggatttttggattcatgggatgaccaatggatggtgatgaacgtgtttacggagagtgattttcggaaggaaaacctgatggaggtgtttacacaatcctacaaaggacaatatagtccgttggtggagttgaactataaataaacgaacaaataaaatgctttatgaaatatattacaattgtattattgtttttgtgtcttatgtcatgtcatagtggacgccaatcatcttgtgaggatgttccggtagagaaagactcggtacaattacgcgtgattcctgtttctatttcggatacagcctatcgcaatgtagaccagactttcgaacaaatctcgtatgtggtattgtcggacaatgttgtaataggagaaatagtccgtactcttgtttctgatgagcgtatctttatattggataaccaaaataagctcttttgcttcgatatgcaaggaaaggtcgagtatgtgattgatgagcatggttcgggtcctaacgaatacgggaatgtattggactttgccttgaaccccccgttgaagatgttgtggatgtacgattcaacacgcaggaagttgcattgttacgatatgtataccggcaaacgtcgtcaatctatctctgccgcttatatggcaccggaacgcatggcgatttggaacggctcttttttctttttcatgggagatcattataattatcctgataatccggaaatgcactactcgttgttttgttctttgtccggagctaaaatcgataaatcttttttcccccatgatagaacgtcagagtttaggttttcctatgggaaggaacatcctttttattataataacgataagttgtattttatcaaggattatgaaacagtcgtttatcagttgacatcagaatctgttacacctgtatacaaggtggaattgccggactctttaccgttggatgttctgatggaagtgacaccatcattgaagttgatgcaaacccgctactcatggttgttgagtaatgcttatgaagcggatggttttttgaatttatggtttcagaaacagggaagctgttatgcagtatattatgatttgttgaaagataaactcatatatgccggtaagcaggttaataatcatcctgtgaaagatttgttatttatatctcaaattcatggagtgtataaagatatgtttttttctgtggttccttcttttgtaatccagtacaagatatctgaaaatccggatgtttttccggatgatctgaaaaatttaacggaagaaagtaatccgattattggcttttatcgggtgaaaagatgaaaaagtagtattaagctcagtatttttccttggttattcgtttagtttataaaaaggcgaaaaatgaaaaaactgaacaatatcgttaactttaaattcttgttggggttcctgctcctttatggattggtagcgttttgctattctcctgttttctctaacggtttcctggattcgtgggatgaccaatggatggtgatgaacgtatttacggagagtggttttcggatggaaaacctgatagcggtgtttacacaatcctataaaggtcaatatagcccgttggtggaattgaactatatggtgctctacggcttgttcggctatgatccgttttggttccatttgatgagctttgtctggcattgtggatgtgccacgttgctttttttcttgattttccgtttgttggagatgtccggccaatccggatctcgtcgaagtttgtgggtggctgccttgactgccttcctttttgccattcatccggtgaatgtagaatctattgcttggatcagtgcggtgaaggttccgatgtatgtatttttttatttgtcaaccttgttgttgtatcttcgttatgtccggtcacaaaaactcggttgttatatagcagctttatgttgttttgtctgttcgtgtttgagtaaagaacaagcctttgttttgcccctgtccttgcttttggtagattggtttatcggtcgtaatctgaaatcatcggatttgtggatagagaaaatgccattctttattttatcggcaggctttgccttgttgacgttggacttacagggacctcgtagtgaggcggtgtcttatacggcagtacaacgtctgttgttcggctgctattctttgttcgaatattttacgaagtccttgcttccgatcaatctgaattatttatatcctttcccaattttgccaggaggtagcgatattccggttcgtttttatgtttatccggtgcttgtggcaggcttgttcggagttttgtatagtttccgtaagaaacgtcttttgatgttcggcagcttgttctttgtcattcatttgttgctatcgctacatgtcgtagccatgcctcgtttgggaatagttgctgatcgttacctttatttgtccctttcgggtattttgttgttagtctcatataaaatcataggttgggtggaaaaagggtatcgtgtgtttccaaagctcctgttgttttcatcaatacttttctatagcctttattttatgagctatacgtatagctacagcaaacagtgggaggatacggacaccgtgaagcattatttgcgtagtttttataaaggagaatacgaagaaaaagatataaacggtcgtgaaaatcacgattgaagtattaacaaattaaaaacttaaagacaatggtacaattaaagaaaaaagccgtgttgttaataggagcattgatgttactcctcggtatgggaatgaatctccagtatgcgctggatgattatgggttggcagataataatgccgtgattgctgtttgggctcaacagacgaaaacaggtgatgatcctgctggtacaggagacatacagaaaggatgtagggattgtaatcttgctgggggaggaggtgctacttcttgttcctgtatatcaggttcagtatctgcatttggtgtaactgctacaggtaaaggatgtgaagtctcaacaggaactggttattattcatgctgtagggtaacaagcgacggtttatgcagatgtccatcttgtaaaaattaaaaatagggctgtaccgaaattatacattttttccatattatgattgatttggggtttaatgttaacttagaaaaaattagatcggaattgtcatgacaaaagtgtattataggaacagcccgttaaactaaataagaatatgaaaaagaatatttgtttgttgctaatagcggctctgatgtgttcttgtgccggacaagataatggaaaagatgattttataactatttcgattgatcctgaagactctcaaattgtatccattgcggattttttcgaaaagattgcaattgtcccgttggaaacgaatgacactatattgataaatgcagtgtataatattattccattgaataaacgtttatatattttggaccggagaagttcttctgtttttattttttctgatcatggagaagccaaagcggttatccatgatcaaggagatggtcccaacaaatatacaaacgcatcaagcattgcggttaatggagaaaagaaagaactgtatgtgatggataaccaattgaagaaaaagtttgtatatgatttgaatggccgtctattacgtgtggatacaattccttataaaataagccaaatattgtttttaggggaaggaagggaagtctgggcacgatcaagcattgaacctgaagatggatatatcatgaattgttttaaacaggatgagttagtggcacaatatcatcctcatcattatgaaaatggtgcaaccatttctttttgggagtctccgttcgttttgtttgaagatggcttatatacccatattatgtataatgatacgatttataaatatgattttaactatcccaaaggaggtttagtgattaaattaggccatgccattccgaaagaattgatagctttgccgatgcaaagtagggaagatgaaatattcaaatatctcaggaaaaataaaaaggttgctcattctccttatttatatatttccgatgagactaaagtcggagtctcatatcaatatgatggttataattgcttttatatctacgataggctaaacggggaaagttgttcttttagaggacctcatattgggaaagttcatattgttgatatcttatacggtacaattgcctgtggcgattatttctattatatacttgatccgtctaaataccaggatctggaaacgaaaaaaaaatcagagatacagtcgttttatcctgagttgttcaacacgctggaaagagcatctattgatgataatccgattctgatggtggcaaaattaaacaaaaaaatatttcgaaatgaataaaactatacattttacatatatgtctttgatattgactttgttcgttttatttattataggttatattcggcaaggtgataacaagttgatttatgaaagtttaaagaaagattcgtataattatcatcaaatatatagtattaatttagaacaaatgaatactgataatataacagtttcagatacattgtctgttttgaaagaaaatggagaaaacatattagtatctgaaattctaaatacaggtgataaatttgtaattcgttttaatgatgcaggatgcatatcatgtatgcaatattttaaaaagcacattgattatattaacatgtttatatcggaagtaggagctcaaaatgtaatttgtttgttgaattccaataatccgaggattatacggtcgtttaaaaaacagtattgcatttcttgtgaagtttatgggctttcaataggacttttatctcctattatggaagtaagtgatactgttgttgcttattatttttgtgttttatcgaaggagtatttaatggaaaattgttttataaatattcaagaaatttcagaacgaacagatgcttattttgaatcgataaaacgtaaattcgctgttttggatggtaagggggattaaaataatcgtaattgttgtatttacttgtgtgttgattcgcctcttcctcggtgaaccttgctacattccatccgaaagcatggagccgactctatgtaccggtgattgggtttgggtggacaaagcttcatgcggcgctttgctacccgaccgttttgctgatattcctttgctgaatgtttttacctggattacgtttttgcgtgagaaggatttgaaaaacaattggaatttgggacgtatgccgggatggcgagaaccgcaagaaaatgatatcgtcgtttttcgtagcctggaaaatcggaatatgcttttggtaaagcgggtaatccgaatagcaaggcgagatggtgtaaattggtactatatgatgggagacaaccgcaataattcggtggacagtcgttttttcggggaaattccggagagttcgattgtcggcaggatcagtcgggtattgttttctgtaaaagataaaaaacgcatattaaaaagaatagaatgatggaaacggacatagatttgatactgcctgtttataatccggatgagggttgggagttaaccgttgtctcgaaatataaggaactggaagtcttgtggaaacatgcagacattcatttatatgtggtaaatgatggttcggcaagaggctttgagaaagttgtcactgattatatccggcaaaatataccagaagttcatattttgagttattcgatcaatcatgggaaaggttttgctttgcgtaaagccgtgtctgcgtgtaactctgattatatcctttacacggatcacgactttccttatacgcttgattctatgtcaagggtattggaaatgttacagcgaggagttgatgtggttgtatcgactcgggataaggcttattatgattgtttaccgttttctcgtcgtttaatctctcgatttgttcgtggctgcaatcgttatttattgcaaatgaactattcggatacgcaagccggtttgaaagggtttagccgcaaaggacgtactgttttcctttctacttgtataaatacatatctgtttgatttggagttcgtttacaaggcatgtcatcatccggatttgatcatggaggaggttccggtgaagcttagagaggctgtctgtttttcggtatttggctttgaaatttgttggaaggaacttttacggagtttatatatgaaaagcagtgaaagatggaaatataaatttggcgtattacctaaaaaataagattataagagattgtttaatttttgtaatactgtttgtatgttcttgttcagcatcccgagtcatgaaacggaatgtacaattgaacgctttcccgatgatccataaaagcattccaaaccgtctgttttattcgtcgaacggcttgaatgaaacagacggaagggaactgaaaatattgggaaatacaataattgaaaaaagtttccttttagctcagtagttttcccgagttgttcgtttagtataggtaataggaaataaaaatggattttgattatagacttttagcaaaatatttgacaggcatgctttctcctgaagaaatgaaacaggtggaagaatggcgtgaattatcaattgataatgaggaagctttctctaaattgatgaaacttcgcgtttcgtggaagttcactcaatataatacgcctgagcatatcgaaaaggcattgaatggattgaatgccaggataaatagtagaaggcaatttcaaatattttgctctgtgatgagatatgcagccgtaatcttgttacttgtatctttttcttatgtgggatggggctatctgaagccggacaattatgtaacgattagggtggaacaagggaaagatgtgaaaaaaatcgtgcttgcagatggttctactatttggttaaaggccggttcttcattgaagattccggagacttttgccgaaggcggtcgcaaactctccttgcaaggagaagcattctttgacgttgcaaagaatgcccagttccctctatatgtttcgacgaattatgtgaatattagggttcttggaaccgctttcaatgtaaaaacagacgagaaacaccaaaatgtagaaaccgttttagcaagaggtaaagttgctttactcgataagcagtggaaccccattttagatatgtcaccgggagaaaaggtgacatatgacaacaataagaacgaatatgccacagaggttgtggatgtgaatgtatgtacggcgtggcgactgaaccagtttgtcttcgaaaatgtcacgttgagggaaatagttaaccaactctccgtaaaatttaatgtaaacataaatttagaatcaacgaagcttgcccagcgtaagttccgatgtgtgatcaatgaagatgaaagcttgcctgacatcttgaaactcttgaaatatttagctcccatccaatatcggatagaggggaaagaaatctttatatatgaataataaaaaatgaatgcctatgatgaaatgacagattagaaaagtaacacacacaacaaaagaaaactataaacttaaaaacttagtactaacattattgaatcacatgtatgattaaaaatgcatcaattgctacattagcaatgtttttgtcagctgcatcgcccgctatggcgacaagcgatgcgcattctttgtatgtgaatctggaactggccttgaatcaaacgacagtcggtaccgtcatacgaagtattagtgaacaaactgggtatgaattttcttatgatgagactttattaaataagaaaatctccaaagtctctgttaatcttaaaaatgaacatatagaaaatgttctgaaagaggtatttaagaatacagggatctcttataaaatagtaaataatcgtgtatttctgaaggatgataattctcaaaggagtgttcattccgaacctgttgtgacagcactccaacagcagaagaaaaaaatatcaggtgttattgtcgacgataccggtttgccggtcattggtgcaaatattgtcctgaaaggtggggctggagtcggtacgataacgaatattgacggagaatttacattggaagagattccggatggagcgactttgcttatctcttatatcggatatttggatcaggaaattttagtgacgaaagataaaaatacataccagattaccttgcatgaagatactcagaaattggacgaggttgttgtggttgggtacggtgtgcagaaaaaagtaaatatgacaggatccatttcgaatgtgaagtcggaagaactgtcggtgattcctaatactaacttgtccaattcattggctggacgtgctcctggagcaactattaccggtaattctggtctgatgggagcttcttctgagatccgtatgcgtggtggattcggcgatccgttgttcgttatcgatggtgttatccgtgataaagaggcttttgataatttggaaccgtatgaaatagatcagatgagcttcctgaaagatgccgcgtccgcttctatttatggatcggcagctggtaatggggttgtgttggtcacgacaaaaggaggtgttaagaatcagaaacctgtgtttaattatcagggatcctatgcttttagcaaacctacccaagaactgtttgcggatagatggacggctattgatgatttggattaccaaaatgctgtagcccgttttcaaggcacgaaagagccgaacggtgaggcggaatatgcttacttccgtgacaacaacatcaattataatgtaaacgattatatttggcagaatccttggaacacaaaacattctttgagtgtgacaggcggaagcgagaaagtgcaatattatgtaatggggtctttcttggcagaagaaggctcttatgtatcgttggaaaataagaaattttctttgcgctcgaatttaacggtagaattgagcaaatacatcaagatgaatgtcaatttggatgcaaatcagtctaatgacaagcgtttctattggccattctcggatgacgacgatcaggctgtgtatgatttataccgttgtacattcaatgcaatgaagacaacgccgttctactctaatttggacgggacaccttctgctacaattacagattatccgatttatcaggattatggttcatggcaagggtggaatcctgtagatcaggttgtcggtaaccgttatctgaaaactcgtcggcgcaatatgaatgggatcgtttcgttcgattttaacttggatttcattacgaaaggcttgagtacgaagatcatggggagctatattggacatgactacaatcggaaacgtttcatgactttccagaagaactacaaatttcagcaggcagatcctgaaggaaatcgtttcttgccggctcctttaaatttgaatgagttcaatacgttcaacttctctcaaaattatgaaaacttggattatcgtgctaaacaattgtggaccgagcagttcaattggtttgtgaactatgccaatacatttggtaaacatgatgttaacgcgatggttgtattcgaacaggcttctaacgggggggaatggatacaggctaaaggggaacaaccactttccaacttagaccagatgtttaattattcgagcgatgccgaacgtcgttggggtgacgctgaagaatataccggtggacgtctttcatggattggtcgttttaattatacattcgatcaaaaatatatagccgagttctctttccgttatgatggtaacacattgttccccgatgggcatcgttggggttttttcccttctgtatcggctgcatggcgtttaagtgaagaatcttttatggaaaatacgaccgattggttgagtaatttaaagctgcgtgcatcgtatggaacaacaggtaatgacttggatgtgaatgatgaagaaatagcagcattctcttatctacagaaatataataaggggggaaattatgtgtttggtaacaatttagctaatacgattacgcctggtgctacgccgaacttggctttaacatgggctacatctaagactgttaatggtggtttggatttcggtttcttcaataaccgactatctggtacagtcgatgcattctatcgtaaagaaaccgatattttgggagcacgcaccgtgacaatccctaatacatatgggcaaacattagctccagaaaactacgctgaacgttcttggcgaggaggtgaaatcgctctgacttggatggataaggctgctaatggtgagatcgattattctgcatacgtgaatttaggttttgctcgcgacaagtgggatgtcttggatgtttcagctacttatcaggaaggtggagcgttacatgcattgtcaccggtaggaaaggctgacggtattttgaccggtttgattgctgatcatttgttgaccgatccagctgaagttgaagccttgaaagcgaaggggtttaaacagtatggtcgtgatccatatttgggtggtattttgtataaagatactcgtggagatggttatacggaaggtcctgatggacgtattgatggaaatgatgcgtataacttgttgagtgaaaatggaacaccgcgtattaattatggttttggaggtaatattaagtggaaaggtatcacggtagacgtgcattttcagggtgttggtaaatatgatcgttttgtcggtggagttgatggtggtttctatcagcatggtggtgccgttcgtccttatttcccaatttggacaagtgataaagtctatgatccagatttgaatccgaatggtgtttatccacgcattgtagggaatggttggtatgaatcaggtgcaggaaatacaagttactggatgcgtaatggggcatacttgcgtttgaagaatttgaatatcggctatgatttgccgaaagcgattcttcgtccgttgggacttacgcacgcacaagtatttgccaatgcaacaaacttgttctgtatttcggatgtaacggaatttttggatccggaacaagaatattatgattcctatccgttgatgagaacattttcttttggtcttaatttctcattctaattttaaatcagaaagaatatgaaaatgaataaaatcaaatatgccataataagtgcagctttcgtattgggaggaatggcaaccggttgtgatacattagatattgacaacttgaatagttacgatgagtcgatggtttgggatgacgttaacttggctacggcgtatgtgaacaatctttattcggagtgctttggaaactggagtgctggtgcagacaataactcagaacaagtgacaggtatgccatggtatttgggtactattacagaaacgggtagtgcttataaaaagtgggattacacgacgattcgccatattaacgaggctatcaaacgtttggaagaaggtgcattggatagcaaaacggctaatggcttgttgggccaggcttatttcatgcgtgcctatatgtattattggatggttttgcatcatggcggtgttccttatataaaggttcctcaagacaaggatatggatgatttatgtgtaaaacgtaactctactccagagtgtttccagtttatggttgaagatttggatcatgccatcacattattgccggagaagattgctggaagttctgctgagtacggacgtgtcgaccagtgttttgccaaagcatggaaagcaaaaactttgttgttgaaagcttctccacagttcaatccgaacaatccatatggtaatgtttattgggaggaagcctatgtggcagcaaaagaagcttatgattattgtgtggctaaaggtattgctttaactccgaattattcagatatttggatacaggaacaaggaccggaggttgtttttccggtagtgaattcgaatccgaataagacttcagcatgggagtacacgacccgtcctgcttctgtcagccgtgacaaatcttatagtaacccgacttgggagtttgtaaaaagttttcctatgttggatggaaaacaatatgatgatccgagtagtaaatattatgttggagacgaacaggctttactgaaatctttctggcagaatcgtgatccgcgtttcaataatgtctgtttatataatggtcgggaatatccagtagctggaaagtctgcgaattataggcaatataatgctttgggtatcagtagtcctgatgatcaatatggtgtaaatccgaatgcacatacgaatgccgtgaacaatgatattttctcaggtttttatatttacaaagcagcagatttaacattgactcaggataaagtgatgacgtatgatattgattatatcctgatgcgttttgctgaggtgatgtttatctatgccgaagcagctaatgaaaccggacattcggaaactgctgttgaaatgttaaagcagattcgtaaacgtgccggaatcgaggctgggaacgatggactttatggattgaaagtcagtaatcgtgaagagattcgtcaggctattttggatgaacgtaatatcgaattgtgttttgaagggcatcgtttttgggacttgcgtcgtacgcgtaatatgatgaaattggctggctggactaaacatggacttgaagcgattgctatcaacccggatggtacggatatggatctgaacactgctagagctaaaattaataataatgagttgactaccggtgattttcgttatgtgattcgtcaagtaccttatacggaagcagctgaacgtgagttcgtgattgaagagtctttttattttttcccaattcagaaaagtaacatcgaccaaaatccgaatctcgaacaaaacaataattggggcggaacttttaatccgacaatggaataaattattacttttgttttttcataaatgaagagggaggccaaaaagacttacaaccctttggttgtccctctttttaattttctttatttataacttaatctatatcagatgatgaaaactaaattctctttattgatttttgcattgctgtttgtgtgttccggaatgatggctcaggataagataacgattggggttatccaatatgacttgggcgatgtagataaaagctttaaggatttgcatgatcagggatttggttcttgtgaacttaattatcagaaaaacaagtttacaaaagattttgctgaaaaagtaaaggcggcctccaagaaacataatataaaggtaacaacggttgtcggtgtgcccggaagccattgtgtttggaattttcgccagggaccggctacgattggtctagtgccaaaagaagaacgggcagaaaaaattaaagtatatcatgaaatgattgatttctgtgcaatggcggaaattcccgctatgcactctcatttcggttttataccggaagatccctcttccgaacaatataaagattttatcaaggtcatgcaggatttggcgaattatgccaagcagcgcggtgtgatgatctttttgagaccggacaggaaacgccgacgactttgattcgtgccattaaagatatcgctactggtaatgtgtttatcaattgcgacctggctaatttattgatgtacggaaaagcgaattctcttgatgccgtgaagcagttcggcagccttatcaaggaattccatgctaaagacggtagatatccggacccgaacaatccgtatgaattgggagctgaagtacccattcctaccggagaggtgaatttcccggctgtcattgcagaactgaagaagcaaggatttcaaggagcattgactattgaatgcgaattgaatggtgcaagacatgattatgtgataaaaacacgtgaatatctgcaaggattattagataattagtatatttgtcagatattatttatattattaaaataataggttgctaatctatataaattataatttactatgagaacaagcagaagaggttttctgaaaactcttggaggggttgcgctcttttcgattgtgccgcgtcacgtattgggaaatgggtatatcgctccgagtgatcaattgactaaaggtattattggtaccggagggatgggaagaggccatgtcaattatgccggtacacgtttggttgccgtttgtgacgttgataaaaatcaccttgaattgggaaagaaactggtgaaggaaaaaatagccgcttatcatgatttccgcgatttgattctggacccgaatgttgatattgtgcacatcgccactccacctcattggcatggtatcatgtctgtcgaggccgctaaagccgggaaagacatctggtgtgaaaagccgatgacgcgtacgatcggtgaaggaaagcgtgtgatggaggccgtacagcaatacggacgtatgttccgcctgaatacatggttccgttttacagaccagttctatggactgggcactcctgtcaaaccgttgaagaagctggtgcaaagcggattgttgggatggccgttgaaggtgacgatcagtgcgcataccggtttcaactggaagtttttctgggtaggaaaagaatatctcgaaccgcaaccggttccggcagagttggactacgacatgtggctcggcccggctccttacaagccttataacccgcatcgcgtacaccagactttccgcggatactgggattatgacggtggagggctcggagacatggggcagcattacatcgaccccgtacaatatatactaggtaaagacgataccagtcctattaaagtggaggttgatgccccgcaacagcatccggatgctgtcggtacttggcgttccattacctacacgtatgacgatggttgtcagattgtcctttgggggggggacttcggtgatccgaatacgccgtatattgccggaccgaagggtaatgtttataaaaattttgtatgcgatattcccgattgggagaggaaacttgccgatttccccgaacccgaacctcaggttacggactttatagaatgtgtgaagacacgccagcctttcgccctgaacgaaaagaatggtttccgttcggctactattgtcaatatgggagcagtggctctgcgtttgaaccggacgctgaatttcgatcctgtaaaacttgaatttattgacgacgaggctgcaaatcgtttgctggaccagccgatgagagcaccctggaatatataacgaattgacaattgataattaacaattgacaattacataaatagataataatatgagaaaagcatatatttcaatagctgccctgttgctttgcggaagcatgctgatggcgcagactccggccaaccgtacggccaaaacgaccgctgccgatgtgttggctcagatgcctgcggcgaaacaagcggcgtacaataaattgattggtgatttgagttctaccggcgaagaaggtgttctgatgttggtaaacatgataaatgctccgggcaaaggcagtaatgcaaatgtcgactatgctttgagcggtcttacgcattatgtcatggcgaaaggggaggagaatgcccggttagtgactgcaaaggcttatctgaaggctttggaaatggtgaacgagcgtgaaacaaaagcgtttattatccgccaacttcagatgttggggaaagacgaatgtatagatgtactggcttcttatctgaacgatgagtcgttgagcggtcccgccgctcgtgcgctggcttctaatggcagtcaaaaagcaggtcaggcattggttgctgctttgaagagtcgtaccggttcctctaaaacacaaaaggatgtgatccgtgcgattgccgatgcccgggtggatggggctgaacctgttttgttggtattgcagggaacgtctgatccgaatatgcagaaagaggtattgtatgccttgagttgtgtcggaagttctaattcattgccagtgttagcaaaagcggccgagaatgccggttacacgatggaagtgactggtgccaacgaagcttatatcgctttgttgaagcgattggtccagagtgatcgtgatgcggtgatgaaagctgcaaagaaattgcagaaagcagcggctaaagccggacaggagcagacacgggaagctgccttgcaaatacttttagcagccgaggaaccggccaaagtatctaagatggttatcgctgccatgaaagatccgagcaagaactaccggaatgcggctttgagctatgcttccggttttgcagataaggagttgtatatagaacttatgaaaatggttcctaaagccaaaccggaactgaaaatagacatcttgaactggatcggacgcgaggccaagaaacctgtcaaacatgacattatccagaatctggaaattcgtttcgatcttcctgccaagcagatcctgttggagcagctcggtgatgtgaacttcgacgtgaagcaggctgcaacctggacattggtgaagataggcgataagtcctatatcccttcgttggccgaattactgaagagcgatgacaagcaagtcgttctgttgggacaggatgctttggctgccttctccggagatatcgacggggcagtggcaaaggccgtctcttctgctgccaatgcgggaaaaatagccggacttgaattgttggccatgcgcaaagctactgccaatatcaataccgtacttgatcagatacagataggctctccagaagtgaaagccgcggcttatgtggctttgaaggatgtagtgggagaacgtgatataaccaatatgtgcggtatgctggaaacggctgacgcattggctgttcctcccatgcagcgggctgttatttcagcattgtcctctcttccggttgccgaccgggtcgaaacggtgacacgtcgtatgttgcaggccggcaataaagattatttgtattatctggtgttggcttctaccggacaaccggatgcgctggcgacagtcgtgaaaggtttccgttctaatacgggtgtcaaaagggatgcagccttcgaagccctgttgaactggaagggtattgaagtggcggacgaattatatacgatctgtaaggaaagcccgtcgtccaactattttgatccggctctcactacttatgtgaaactggtttccaatccggcatttacaggtgaaaaccgtttgttaagcttgcgtaaggcaatggaaattgccaaaacggatgcacagaagatcgcgattttacaacagattgaaaataccggaacattcttgggtatgctgtatgccggtgaatttctggatcagaaacctgtacagcaggctgccgccaatgcagtcatgaatattgctttgggtaataaggagtatatgggggcaaatgtccgtgctttgttgaataaggtaatggaggtgcttgacaatccggatgccggctatcaaaaagaagcgatcaagaaacatctggccgagatgccgcaaggcgaaggattcgtttctttgtttaacggtaaggatttgaccggctggaaaggtttggtacagaatccgattgcccgtgcgaagatgaaaccgggacagttggccaaagagcaggcgaaagccgatgaggtcatgcgtaaaggctggagcgtggaagacggtatgctgatattcaatggcaagggtgacaatctgtgcacggaaaaacaatacggtgattttgaaatgtatgtggactggatgcttgatccggccggtcctgaagcggatgccggtatttacttgcgtggtacgcctcaggtgcagatatgggatacttcgcgtgtaaacgtaggagcgcaagtcggttccggtggattatacaacaaccagatgaacgagagcaagccgacgaaagtggccgataataagctgggtgaatggaacagcttttacatcaagatggtcggtgaccgtgtgacagtcgtactgaacggagagaaagtggtggatgatgtgattctggaaaactattgggatcgcaagctcccgatcttcccggtcgaacagattgaattgcaggctcatggcagcaaggtttattaccggaatatttatgtaaaagaactcgaacgcaaggaaccgttcaaactttcagccgaagaagagaaggaaggttttaaggttctgtttgacggtacgaatatgcatgaatggacaggtaacacggttgattataccctggaagacggttgcatttccatgataccgagcaagagctatggtggaaacctgtatacgaaagacgagtatggcaacttcgtgtaccgtttcgaattccagttgacgccgggtgctaataacggtgtcggtatccgtaccccgatggaaggggatgccgcttatgttggtatggaaatccagattctggattgcgaacatccgatttataaggatattactcctttgcagcatcacggttccgtttatggaattatcccggctaaggcggaacatcatagtgcgtttaaacctgcgggtgaatggaattatgaagaaattgtagctaatggggataacatcaaggtaacggtcaacggggtggtaatcatggaaggcaatatccgtgaagcgacaaagaacggtactgccgatcataaggaacatccgggcctgttcaataagaaaggacatatcggtttcttaggtcatggctctcctgtcaagttccgtaatattcgcattaaagagttgaaataacgctctttttactatgccgtagagtgaaggtgtgtcgtaatgaacgatgcaccttctttgttcatcatcgtctataaaagtcagtaaattttcttcaaactgtgatcttttgaagatttctttgattgccgctggaagctccgtgccatctcctccgccgttcccaacagcacgccttccgaggcgatgattttcgcatcgtccttctgcgtcacgtagcgtatgcagccgccgaacgaacggcctttcttgatctttcttatcatgaggctatccttctttcggcctgtaatcatccatgatccgcttcagctttcctgcagcccgtctatcagcagccttgtcttgtaaaagcctgtctggtacaagagctttgtctgctggttcaggttgttcgccattcccgccaggctgcgcagcagcgcgttctcttcaggcgtatgccttgccgtaacggtggccgccagtgccgcctccttgatatagaccgccagactccggccggacttccctgccctgaatctgagagcctcgtagctggcgggggagaacttcactgtcactcccttggtcggcttccgcgtcctgcccagtgctggacggccgcgttttttcttcatctcattcatatcctttgtcatatgttttttctttttcgtccgtacttctttcatttttcattccaaaatctgcgaccggcgggagtggatttgccctccctgcaaccaccgggcgctggggagcaagggttttcgggaatccggaaacatacccttgctattactttgcagtaataatgaccggtttccattacatgtcaaccgatcacgacacatagccgtgtcaaagccataagttgattcttaaaaattatatattgtaagcagctacagggtgaacaaaataaccttcgaggtgaaagacccatgggagcatttgtccctgtagccggctattacactgaatccaacctttaaaacacaggaaatattagtatcaatggtttctgataaccgtttccattcttagtctgaaaggtggcaatgaaagtatatccgtcagtggcgtacatatattttctatagtcatccatcccggcagtcattcactcggtctgacagtcatcctgtctgacattaatgaccggttataaccgttaatggttggttataaccgtcaatggccggttgcagtcattaatggtcggttacattctccgacaccaacatagcgacctgcttgccttcacccggctgggcggcaagatactgtaccgttcttccgacaccgaaaagttgcttgacagctgctaccgggaggctttccactggatgaacgactttaatttattcataaaatattcatacactgagtatttcccttataataaattatgatccggtgacaacattggcataacatggcgggacatgaaaacatttttccggtatggcaataagatacagggattccgttataaaaaaaggcccttattttattatgtcattatgttactctgaaattggggcgggctgcccgtgtaccggtagaacggtccgttcctgtaatggcggcacatcccgtaccggtatcattatccgccggcaatgccgtttcccggtcttgccggagtgaccttatgccggccggtgacaaccgcatgtccgtgtgtaaacatggcggcgcataaaaacaggcacaccctccgggctcctgtcccgtcggatgcgcctgtctccatcatgtcatatacagccggactcctccggcccatgcctctatctgagtatcggattcgagagcagtatcttgtaataggccaccccgccaatctctaccggcatcctcgccatcatgaactgcacgctctttctctccaccttcgcctgccgcatgagcctctgcacgataaacccggccgagaaccttgcgcatcttttatccttccagacgatgaacccctcgctgtcgtcggcccggcagatataccagtcacccgtctcgtcgtcgtgggcgaagttcacccgtccgccgccgaggattcccaattcgattgacatcgtctttgacagatagacggttcccctgctgtcaaggttgatggtccgctttcccttgtatgtgacttcctgcggacgggagttttccctgttgtatactatcagtgccataattgtctttcttttatcggttgaactgttttcgtttttcaatacatgaagctttccaccgccagcatctggcttctccatgcgaaaccgctgtgggtacgtaccgcgtccactatcctgcatactttctgcgatatggccgatgctgagatacccatgcattccgccagcgccttgaacgagaactgcgcctcatagaaccgaagcatgaacatccggtattcctcgtaggagaacttctgccttacgaaacgcagtatgtctcttaccagccgttcgcacccattcaggtcgtcctcggaaaggaattttgcctcttcgccacatcggaggaagaaatcatcttcagggtgtgcataccggttctcccttttaatctttaccagggccgcctttttgtagcatccgatgaaatacgcgtcatagtccgttatgtcctttccgggaaccagcacctgccttcttacaaaaaggtgggtgtcatggaaattgtcctcgtccagcattccgtaccggcgtaacgtccctctcaacctgtcataggatgcagtgaaccactcgttgaacagtctttccttttctgcgctcttgtctgccatagctttataattttttgagttatacatggcctacacgggtaggcattcttatttcttgtgcttcctccagtttgtttttcggcggtctccggcaaggcttgccgtgaaaaaatacgctcacgcgaagcgtgaggaagattttttcacgtgcaaccagcccgaagggccgccttgcgggaccggcctgaaaaacaactatttttgccgcaagaaatgaggatgacggattccttccttctatctattgtctgtccggtgagaatttagattccatgcagcttttctgtctttggtatgtttggagaaatattcaaggatatgaaatgagaacggcaatacgtgatgttgcggaaggagcagatatgggattggaaacaggaagcgtgcccgggctttcatgcagtttatacggcggtgttgattttgaggaggatgacaggaaagtgacaggatggtcggctgtcggaaaagaagcaataccggcggacgtggatatgggcaaaaccacccgtacatgcaatgcagagggagcaggagagcctttaccacagccggagccccttttcatgccatatcccggcatgaaaaggggctcctggacaattcttttcctttttccttgtcgcacatgcactacgtcggtcgcagttttcgccttctgaatcaattttcccgtccgtcacccgcgcattcggagcgtttttccggcagaaaatttcgccgtacggaaattttctgccggaaaccgaagggaaaacgcgcagatccgcggggacggcggaactttgatgaagaaggtgaaaatcccccgtcccgtaaatgccttccctcagatggcatcgcatatctccttctccatcttttccagcttatgggacaggacttccatgtcgctgctgatcttctggttggttatccgggcatatatctgagtggttttcaaatccgtatgccccaaaagacggcttacggtctcgatgggcacaccgtgcgagagcagcacggtggtggcgttcgtatgccgggccacatggtaggtcagccgtatcttgaaaccgcactgcctgccaagttccttcaatatgacgttgcatttgctgttgctcggtaccggaaatacatgatcgtccttggacagtcccttgtacttctctatgatgcgcttgggcacgtccagcaggcggatgttggactcggtgttcgtcttccgacggcgggtgatgatccagaggttgccgtcgaagaaggtctggagccggtcggtcgtcagcgccttcacgtccgcgtatgccagtccggtgaacaaagaaagaagcatcaaagcaagggagatagaaataaagagaatcaaacgcaacttgttgtaaagcaacggttttgcagtcgtttgccattacagccaaacagcagggaaaggcaggataatgcaaggtttccgctaccaagtcattacctgttccgcaacctgcctgaagtctgaaaaacagcgttcctaatgcttgtaaacaagcattatacgtgcggcaaggcttcaaatccgcagatttagcagcatccgttccgtttgcgccgttctgccccgtttccaattctgtcggtcggcaatgtatcactaatattgcaaccaaaaaagttatggcaatgaagacagaaatgaaagtgctgctctacatcaagcgcagcggacaggacaaggacggacggtcgcccctcatgggcaggatagccgtcaggggaaagaacaattctatcgcacagttctcatgcaagttcaaggtggatgtaaggctgtggaacgccactgcccaacggtgtacgggcaagagccggatggcggtcatggcaaaccgggagattgaacgcacgctattgttgttgcgccagcgtttcaacgaactgaaggacatcaaggaagtcgtttcggcagaggaagtgaagaacgcctaccaagggctggcggaatctcaggacaccatcatgaagctgtttgaggagcacaacagcgactatgccttgcgcgtgggcgtaaaccgttccgcaaccagctattaccattacacgaacacttaccgccacctcgccaccttcctgaaagacaagtatcatctttccgacatgcccgtcaaacagatggacgagaatttcattgaggatttcgacatgtacatgcgcaccgtcaagcggtttatgcccaagaccatactcggacatgtaaaccgcttgaaaagcgtgatgatgcttgccgtgttccgtggcattatcccgttcagcccgttcaaaggctacagaccgcaaaagccggagttcaagcagatgtaccttacggaagaggaactgggcaagtttgcaaatatgacctacgatacgcccaaccgcaatttcacaagggacatgttcctgttctcgtgttggacgggcatttgttactgcgacatgagggcgttgacggagaagaaccttgtaaaagccgaggacggaagcctgtggattcataccgaacggcagaagaccggaacgcccgaatgtgtaaggctgatggagataccgctcgccatcttggagaaatacagggacatggatgcaaacgggaaactgctgcccatgcttacgaaagagagcatgaaccgccacctcaaaaagatgtcggtgatgtgcggcatcaaccgtccgatttcattccatcaggcacgtcatacattcggcagcataatatgtctttcacaaggcatacccatcgaaacggtaagcaaaatcatggggcacaagcatataaagaccacacaacggtacgcgaaagtcacgcaggacaagattgaccgtgatgtggacaggctgaatgaagccatcggcggcaagttttccttgttcgggattgatgcatccccttccacgatacgtaaggacaacacccggcgcagggtaaatccgagttggaaacaaagggctattgtcaaacaaatgatggagggataagccatgcgcagcacgttcaagctattattttacatcaaccgacagaaggtgaagaagaacggcaaatgccctgtcatgggacgtattacccttgacggcaaggtctgccagtattctacagggttggaagtcgagcctgcgtattgggaagccgacacgggcagggtttccaccgacgggcgcaaggaaagccttgactgcgagaagaaaaaggaactggtcaggctaaacgatgccctgtccgcactggaagccaaagcccatgccgcctacaaggagaatgtggactgttacggcttcgtgtcggctgaaatcatcaagaacgccgtgacgggcaagtcgcaggtgaaggaaaccctgcttgcgctgatggacgagcataacgaagaatatgccaagcgtgtgggcattgacaggacaaggcacagctatgtccgctatctgaccacacgcaagcacattcacaattttatgaagtacaagtacaacatggaggacatgccgttgcgctcgctgaccatgcgcttcatgaccgacttcacgttttacctttccaccgtgctgagattgaaagtgtcggcatacaacgactatctcatcctgctgcacaagatgacgcggctcgccttgaagaagcatattctcaaacgcgaccctttcgcgggacacaagatagagaaggttccggtgaaccaccgctacctgacgggggagcagtttgagaagctgttgaaagccaagctgcccacataccgactttgtcatacgagggacttgttcgtcttttcgactttcacgggcatcgggagggcggatttagcgaatttgacggaggacaacatcatcacgaaggaggacggtagcaagtggattcacatcgcacgtcagaagaccaaggcggagtgccatatcaaattgttggacatacccttgcgcatcattgagaaatatcgcggagaaggcaaggacggcaagctgttttatgtgccaatcaccggaaacctcaaccgcagcctgaaagtgattgccgaacaatgtggtttggactgccatcttacctactatcaaagccgtcactccttcgcaaccctgatttgcctgaacaacggcgtgccgatagaaagtatcagcaagatgatggggcattcctccatccgcaccacgcaaatctatgcggaaatcaccaaccaaaaggtgagccgtgacttggctgtgctatccgagaccaccaaaggcaagttctccctgcctgatgacgggatgccctcgcgtgtattcaagtgcggcaattacagcggttggaaaaaggaatgtaaacagaattcagacaatgaaaaatgatgcggacatggaaagaggaataatcacaattactgaaaacggggcggttattctgccgaccgctcccgtatggatgacgcagcaggagatgtgcgatgcgttcaatgtgttcggctgctatattcgtaaggctattgctgccatatacaagaacaatgaattggcggaagaggaaacggtgcggcacgtcaggcgggacggcaggatttgctatgacgtgtacagccttgaaatggtgattgccgtttccttcaagttgagaagtcgggagagtatggctttcagacggttcatcatggaaaggctgtacacagcaagtcgtgaaaagcctgtaaatttgttcttttcgctgtccgtagccagcccacgatgtacgtgttagctgtaaaggatataacattacacaaagaaagccgatggcgacaagtgaattgtctgaccatcggctttctttgtttttgcacattcagatttacgtttccagacgataggcgttccgatacccgctcatcaccatcttttcaatgtcggactccttgtacaggatttttccgcccagttggtaataggcaatcatcccgttgttgcggtagtcctgcaaagtgcgtcggctcaccttgagccatgccgatacttccttgtcagtaaggaattgttcattacttggcgaagtcttatggcttgcgtccatcctttctatgccttcaaacaaggcattcagttttccgatgaagccgacttccaattcacggtcggcaagaatcaagtcgttcataatttacagtggatttagtggttgcacattgtgttgtctgattagatgctacagccacgataggctgcatccttacgcctgtcctccacgagccggacgatgcgctgcacgtcctccggcttatagaaaatcttgtgccctatctgagagtaagccagcgtaccgttgtcgcggagcgtctgcaaggtacgcggactgatgcgcaactgttggcagacttcttggttatccatccaacggctgagccgtttcccttccctcttgcggaggatttcatttacccggtcggacaggcggttgagcttgccgaccatctcttcgtacttttctttcgaaataattactacattcatttcttatactgattttagtgttaataatccgtttcgcctgcaaagtaaatccgttgttcgcatggaacaatggatttgcaatgaggtggcagcttgtggcagcaagtggtcgggagtggcgtaatctaccgaacccgtagcgtatgttccaagcgtccgtggtgcaaagaaaagcgaagtccggcataatccaactactttgcacctgcgtggcagcatttggcgtcggtgtggtagcctgtggcgttcttcggattcctatacttcttgaaaggggtttcttctgtttcacgccaagccatgtccttaaatcgattccaaccattccaattaagcccttaaaaattccgatgtccgtttcatgtacaacggcaaaacagcgcagtctgaactgtttaggcaatgtgtaaagtgcaaaaccgaacattgttgccacagccaatccattcgtttgactgcctgcaatacaggcgtttcctttgctgccgataatcggtcaactgtgcgcacaacaaccaacattgttaaacatttaattcaagcaagtatgaagaagaatttaagcaaccaaagtatggatgcagcattgcaggattttttaggcaataagccgagtatggaagcaccgaagccagaaacgcagcctgctgacaagcaggaacagccggaggaggcaagtgaggttgtattggaacagctggacgaaagtccgcaggtgatacgccgcatcagcggcaagcagcgacgggcatcgttggaggaatacaaggaatcttttctcaccgttccgtccatcgaagaccgcaagcccgtgttcctcagccgtagcacgcgcgacgcccttgaccgcatcgtccgcatgttcggcgagcgcaggatgagtgtgtcgggactggtggagaacatcacccggcagcaccttgccacctacggggaagacatcgaggtatggcgtaaactctgaaaattaagaagtggattgacggggcgcaattcagagttactctgaaccaatccaacggagttttgaggggagcaagtttgtgtttcgggcataccgaaacctcctgctcccactcccaaactccgtgtaagccgcatcccgttggtctaatgagtatctgtactataaatagtaataaagaatggaacaaaaacaaaaatccaatcgaaggaacaagggaggtcgtcccaagaagggagcggctgacaagctgaaataccgcctcacggtgaagatggcgacatcggactactacacgctgaaaggcaaggcacgaagtgcgggcatgtccgctggggagttcctgcgcggctgcatgagggacgggcaggtgaaggaacggctcacgccggagcatacgggttacatccgccagctatgcggcatggcgaacaacctcaaccagcttgcgcacaaggctaacgcggcaggcttcgccaccgtgagattggaatgccgtgtgctggtagcacgcatcgaggaactgcttaatcgaatactcctatgatcgccaaaatcgtcaagggaagcaacttcaagggtgtggtaagctacattcttgacaaggaaaaggacgctaaaatcctcgtctgtgacggcttgttcgccgagaataaggagacaatagcgggcagcttcgaagcacaggcaaggatgaatccgagggtaacgaagcctgtcggacacatcgcattggcattctccaaggaggacgaacatcgcctgaccgactgcgcaatggcagggatagcattggaatacttgaaaaaaatggggataaccgacacgcaaatcctcatcgtgcgccatttcgacaaggaacatccgcatgtgcatatcgccttcaaccgcattgccaatgacggcaggacaatcagcgaccgcaacgagcggatacgcagcacacgcatctgcaaggaactgacgcggaagtacggcctgtactttgccgacggcaaggaacaggtgaaacgccaccgtctgaaagagccggacaagacccaatacgagctttattccatccttaaatcggaagtgtcaagatgtggaaactggcggcagttaatggctaatttagagaaacaaggcgtggaagtgcagttcaagtacaagggctgttcggacgaggtgcagggggtcgtattttccaagaacggatattcgttcagcggctccaagattgacaggaggctcagctattccaagatagatgcggcattgaatgccaaccgtcatgaggaacggcagagaatggcgaccaaccaaacggcagaccacgaataccccatgcaacaacctccgcaatatgagccaagaagcaatgatgacttgtacagcggttccatcggcttgttcatgcctgccaatgcaaacgcacaggcggatgagaactatttcgaggaacagctaaaacgtaagaacaagaaaaagaaacaacgtaaaataagattctaaatatggataataatgaagtttatgcactcttcgaggacatcaagaatggcttaaagagtatcaacagcaaattggagaacgctccaaaagtaagtaacatccaatcaggagaaccagctcctgtaatggatttggctcccataaaggacttgttcgacagttccgcgaaggagcatcaggctcagaccaaagccatgctgaccaagtatgcggaagcggaagtaaagacatcgaacaggattctgcacctgttgcgtgatttgagagaaatgtttgtccgaaattcggaagaacggacggacgaaccgcaggagcatattcaccgccacatctttgacgtcatgtccaacaaggccttttctcttttggtcggcatgggtgtcatgtgcagcctatccatctggggcaacatcgagctttggcagtccaaacgccaatatgcagacgatgccttgaaattccgcgtcattcgcttatggggaggatgcgatgcgaagcgcatcctttggctgaatgatgtgtttgacatccgacgtgacgaggaaaccattgactggctgcgccaagaggctgatggctatgacagaaacttgaaatctgtttcggacagcctgatgcaggagaagttaaaggtgaaataataaacggtatggcataacctactttgaagaaaacggttatgccatacttgtttcgtttcactatatttaatttgcactccgatattcattcggcgtacaccccgtctgcttcttgaaccatcggctgaaatgctgcggatattggaaacccatctcgtaggcaatctcgctgaccgtcttcgaggtgttgaacacgtgttccttggccgtttccaaggtcttctgctggatatgcttcaaggcggacattcccgtctctttctttagcaagtcgctcaggtagttgggggaaaggcagagcttgtcggcacagtattgcacggtgggcagcccttccgaggcaggtttgccggaatggaaatattcatctaataaggtctcgaagcgggcgaggatgtcgctgttcaggttctcgcgggtgatgaactgacggtcgtagaaacgctcgcaatagtcaaggagcaacttgatgttgtcggcgatgagtgccttgctgtgcttgtccaccgggtattgcagttcctccttgattttgaccagacaatcaatgaccgtccgccgctcctgctccgagaggtggagggcttcattggcgttgtatgagaaataggaatagtctttcatcagtcccgcaagcggcgtcttgcgcagaaattccgggtggaagcacaacgcccatccttcgggctggtgcagcttgccgtcatcttccgaacccatcacctgaccgggggcaatgaacagcatcgtgccccgctggtagtcgtacatgctgcgtccgtatttcaagtttccgcaatccgcgtctttcagcaacacggtataaatgctgtacagtttccgcccgaaatgcaacggcttggcttcccgtgcgtctatcacgcagaccagcggatggcgcgtctccacgccgaaataatcgttgtatgcctgcaccgagtctatcttcaataaatcgctcatcgttatttctcctttctttccaatacccttatcactttgcacggattgcccaccgccacgcaacgggaggggatgctctttgtcactacactgcctgcaccgatggtcgtgccttcgccaatttccactcccggcaggatggtcacgccgcctccaatccatactttcgagccaatcttgataggacggatggtcgcctttcctgctgtgcgctcctccgggtcaaggggatggttggtcgtataaaagcgcacgtccgagcccacatacacgtcatcgccgaactccacgccgccagcaggctggaaggtgcagttgaaattgatgaacacgcggtggccgaagcgcacgtagtccttgccgtaattgcaatgcaggggcgcgaagatggtcacgtcgtccataggtctgccaaacacttcttccaagatgcgcttgtccccggtcgtgttgaactgcatcaggaggcgcatcgtgcgcatccgttcctctatctgttccttgtcccatgcaaggtattctttttcgggtaataaattcttttccatctgattactacttgtttgatatcgcaaaattagccaaaatctctcattcctaaagtacaaaaaactacgatttgacaaccaaaatcacagaaaacgtattctccgtttcccatagctacgaaattggttgtcctatctgtggttcaggtaggggcaggagaatgattgcgggataactttgcagcagaaaattataaaagactggaaagatgaaagcaatcggattattatcaagcattttccttgccttattctgtatggcaggaacaatggaagcgcaagaaaacggaatcctgttgagcgaaaagcagcggcaagtggcagctatcagcttttacacaacgcaaggcgaccaagagagactgaaaacagccctgtccgccggattggatgccgggctgacggtgaacgagacgaaggaaatactcgtgcaactttatgcctattgtggttttccgcgcagtatgagcgcgctcggcacattgatgtccgtattggaagaacgtaagaataaaggtataaatgatgaggaaggcaaactgccttctccgctgtcggagcggaacagcgtggagttcggtgcagccaaccagcgcaggctgttcggcagggatgcgcagggagcggtattgaagttcgcgcccgccatcgacgagtatttgaaagcacacctgttcggcgacatcttcgggcgcgacaacctcgactggcagacgcgcgagcttgccacggtagccgccctcgccgtgcgtcacggggtggacaacgaactgcgggcgcacatcggccacgccaagaccaacgggctgaccgacggacagataaacgagatactggctatggcacggcggtgcgagaacggcctggtgctgacggaagcacaggagccgcccaagaccttcaaagcagacccgaatatcagagtggaaaaggtattttataaaaacaggtatgacattacgctggttgccgatatgtatctgcctgccgactttgacagtgccaagcgatacgctgccatcatcgtggggcatcctttcggggcggtcaaggaacaatgtgctgggctgtatgcgcaggaaatggcacatcggggatttgtcgcattggctttcgatgcctcttatcagggagaaagcggcggaacgccccgccatatggtgtcgccggatgcgcttgtggaggatttcagtgcgtcggtggactacctcggcatccagccgttcatcgaccgcaaccgtatcggcgtgataggcatctgtggcagcggaggcttctccgtctgtgccgcctcgctcgacccgcgcatcaaggcgttggccacggtcagtatgtacgatatgggacgcgccacccgtaacgggctgggggattcgatgacggacgaacaaaggcgcaaactcttggaggatgtggctgaacaacgctggaaggaagccgaaggcgcggaaccgcttatccgtttcggaactcctgaaaagctgcccgaaaacgcctcacctgtgcaaaaggagttcttcggctattaccgcaacaaggagcgcggctaccatccccgttacctcggcacatgctacaccagtcaggcggcactgatgaatttttatccgtttgctatgattaaggagatttctccccgtccggtcttgttcattgccggggagaacgcccactcccgctatttcagcgaggatgcctacaagcaggcaaatgaaccgaaagaattatatgtcgtgcctaatgccaaccatgtggacttgtacgaccaaacggacaagattccgtttgacaagctgacggacttctttacccaatacttgcaataataatcattctaaatataagagcatcatgaagaaagaaaatgacaaccgtacagaaatgagccgccggggattcctgaaagcggcggcgttgacaggggcggcactctgtgtgtccccggcattggaaaaagttcaggcggcggaacgggccatcggcaaggcatccgccaaagacatcccggctggaatggcggcagtgcgcaaacaaaggactttgggcaaaggcaaagcagccttcaccgtgtcggcgatgggcttcggctgtatgggcttgaactaccaccgcagcgaacatcccgacgaagcggcctgcatccgcttggtacacgaagccatcgaacggggcgtaaccctctttgacaccgccgagagctacggccccttcaccaacgaggtgctgatgggcaaggcgttgaaaggctataccgaccgtgtgagcgtcacctccaagttcggccacaagtatgtgaacggggtgcaggtgaagaccgaggaggacagcagccccgccaatatccgcaaggtgtgcgagaactccctccgcagccttggcgtggagaaactggatatgttctaccagcatcgtggcgacccgaacacgcccattgaggtggtggcggaaaccattgcggagcttatcaaggaaggcaagatactccattgggggctgtgcgaggtgaatgccgacaccatccgccgcgcccacgccatttgcccgattactgccatccaaagcgaataccacctgatgcaccgcacggtggaggaaagcgtcctgccactgtgcaaggagttaggcatcggcttcgtgccatacagccccatcaaccggggtttcctcggcggtcttatcaacgaacacacgaagttcagccccaacgacaaccgccagacgttgccacgcttccagcccgaagccatccgtcagaacctgcgtattgtggaagtgctaaaccaatttggacggacacgcggctatactccggcacaaatcgccttggcgtggctgatgcacaagggcgatttcatcgtgcccatccccggcactacgaagctggcgcacctcgaagaaaacctccgtgccacggagattacgttctcgcccgaagagatgcaggaattggaaacggcggtgtctgccattcccgttgtaggcagccggtatgatgcgttgcaggaatcgaaagtacagaaataatacaaggatagtgctatgaagtccattttgatactatgtctgttgttcctgcttgccgggtgcagcggaaaagacagagatgtcctgatgattgccgagcaaggcagcttcgccgtgggcggcacggtgctgaaagattccgtggggcatacctaccatggcgaccatgcctacgtgttctatcagaagcccgtggatgcccggaaatatccattggtatttgctcacggagtgggccagttcagtaagacgtgggagaccacgcccgacggacgggagggtttccataacatcttcctgcgcaaaggcttccctgtctatcttgttgaccaaccacgaaggggcaatgccggacggagtacggagaccgttaccatttcgccagccttcgatgaagaactatggttcaaccgcttccgcgtgggcatttggccgaactattttgagggtgtgcaattcagccgcgaccctgaaacgctcaaccagtatttccgacaaatgaccccgaccattggcacgatagacctcgacctttattccgatgcgtatgccgccctgttcgacaagataggccctgccgtctttgtcacccattcgcagggaggcggcgtaggctggctgacgcttcccaaaacgaagaatatccgtggaatcgtcgccttcgaaccgggtacaaacgtgcctttccccgcagggcagatgccagaggaagggaaagttctgacactctccaaaaaaacggaaggtgtggaagtaccgatggaaacattcaagaagtttactcgaatacctatcctcgtgatttacggcgataacctgcctgaaacggatgaacgtcccgaactgtacgaatggacgcgccgcctgcatctgatgcgcaagtgggcgaagatgctcaatgacttgggcggggacgtgacggttgtccatctgcccgaagtagggctgcacggcaacacgcacttcccgatgtcggacttgaacaatcaggaagtggcgaaattgatatacaaatggttgcacgagaaacaattggattaaaacggtaaatatatggacaggcgaaattttataaaggctgcaggattagcaagcggggcagtatttctatcaaacaggctgtccggaactaccctaaacccgactgaaaatccccataagcccgttcttcataatggggtattgaatggagtatgcgatttgcacatccacgccgcaccggacataaaggaacggactgtaaatgaattggaattgtgcaggactgccaaggagacaggttacaaggcggtgatgttcaagtccaatgtctggtcttgccatgaccgcgcttacatagtgcgtcaggcactacccggatttgcgtgtttcggttcccttgtaatgaatcttgcattcggtgaaagagtaaacatccatactgcaaagcaggcactgaatacatccggtaacttgtgccgatgtatctggatgcctacacaagacgcatcctatccgccgttagcggaagccggacatacaggaaaaaccataccggttgccgacactgccggaaaaatattaccggaagtagtgcaggtgatggagttatgcgcagaggccgacatcattttcgctaccggacattcctcgcctgacgaatctcttgctatggcacggacggcgaaggaaataggcttgaaacggtttgtgatcacccatgccaactcccggatttggaaactcacgcacgaccaaatacggcaagctgtagatttgggcgcatggatagaatactgctacctgccacgcttgtgggggccgggaacgggacttcccaatatggaacggcagacgaaggaggaattcctgtcatacatccggcttgttcctgagcggagctttgtcagcaccgaccttggttctgccggattgcctgacccggtgacaggtatgggaatgtgcatcgaagaaatggcttcatcggatgtaccgcaacaggaaatagccatgctggtacgcaaaaatccggcatggcttctcaatttaactgaatgaatatggacagaagaaaattcataaagactgccgggcttgcagccggagcgactttgctttcaggaataggcttggcagaagtgacaacagaaaagaccaagagtatgaaaatagtcgtattgacaggaagtccgcgcttgaacgggaacaccaatcacatggcatcccaattcataaaaggggcggaggaagccggacacgacgtgtaccgcttcgattgcacaaggcataaagtggcgggctgcatcggttgcaacgcctgtggcatgaacggggactgctttatgcaggatgatttctcggaactgcgtccgcatctgttggaggccgatatggtggtgttcgtctatttcggcttttcctcgcagttgaaagctgtgattgaccgcttttatgccattaacggcaggataaaaggggctgccaaacaagcggctttcatcatggcgtatgccgatacagacccgaaagaggcggaaccgatggtgtcccattacaagaccctgctgaattatctgggctggaaagacaggggcatggtcatcgctcccggaatgtggcctgccggagccgtgcagaatacgaagtacagccgtcaggcatacgaattgggcaagagtttatagaaagatgttcaaccgttttaatcttgaataatgatgtttggaataggaacacaagagataatcttcatcgtactgatagtcctgctgtttttcggcggcaagaaaatacccgaactgatgaaaggtctgggcaaaggggtgcgcagtttcaaggaaggcgtgaaaggcgtggaaaacgaccttgacataaaggatgataatcctgtcaaatgacaatatggagcaggcggctgagaaaactcaaatcggcgagatgtctttttgggagcatttggatgtattgagggcttccctgataaagattgccattacgactgtgctgtgcggcatcgtggcatttctgttcaaggaagaagtgttctcggtcattcttgctcccaaaagcgactcgttcatcacctaccgcctgttcagccatattgcggaatgggctaccggaacaggcaatccggccttttccgtccagcttatcaacaccggactggcggaacagtttgtcatccatatgaaaacatccgtctatatcggtttcctgctttcatctccctataccttgtacctgttgttccatttcatttctcccgcattgtacgagaatgagaagaaatactccttgcgtgtggttgggagcggatatgtaatgttcattttgggggtactgctcagctatttcctgatattcccgttgacattccgtttcttgggaacttatcaggtcagcagtgatgtcgccaatatgataacgcttcagtcctatatgggaacactgctgatgatgagtatcttgatgggcatcgtgtttgaattgcccgtgttgtgctggctgttgggcaaactcggcatattgtccgccggattcatgagacgtttccgcaagcattcagtcatcgttatcctgataatctccgccatcatcactccgacatcggacatattcactctttcattggtggcattacccatctggatgctttatgaagtcagtattctgattgtcggaaaatcaaaagggaacaagaaagatgagatttgaacaaaagttacaggttagaattgctctcggatatgttgtaatgctcgttgttgggataatcatgattgccattatgttacacgagcgtaaacggatacataaaatagaagcagagactgaggatattcgtcaagtgagccgcgacatcaacaccgtccaccgccgcatcacccggcttaccctgcttggcgagggtgtcatcggctgggacgaagcggaccgccgccactaccacgcccaacgtctgcgtgccgacagcctgctgcaagccttgaaaccccaatgcacggcgtatgtgcatacggcacagatagacacgctccgctcgctattggcagacaaggaagcccacctgctgcacatcgtagaagcggtggaacggcaaggggacgcggacagcctcttggtgaaccacttgccagacgtggcgaggcgtgccacccgtgtgcgcaccgtcatacagaaaaagaaaggcattgcgggattcttcggaggcaagaaaaccgtacaggtgttcccttctgccaaagaattgcatgatttcagcgacagcctgataacccttcaacaagaacagacggcggaaatggaagcatacgctgacagcctgcgcagccgcaaccgggcattgaacacagagttgaaccgactgatacgcgacctcgatacacaggcacaaaaagcctttacggaacgggaacgaaagattgcagaagcgcagacaatgtccgtgcggctgttcaccattaccatatccgccgccatagtgctactgttcctctcctaccttgccatccatcgggagatgaaacgcaacgccgatgaaaagaagcaacgtgaaaaactcatcgacgaattgcaggaaagcaacgagaaaaacaggcggttgatacggtttcgtcgcaatctcatccagaatgtcacccacgaacttcgcaccccactgaccgccatcagtggcaacgccgaactgctgctgaacgatgcagaagtagacaaccgtatgcgccatgcacagaccatccacgatgccgccggacgcatggcagggatgattaacagcctgcttatgtatttccgattggacagcggcaaggaaacgcctgtcgtcaagccgttcaagctatgctccatcgctgagactttggcaacagagtttgagccattggcaaagaacaagggactcaacttcaatattgaaggagaaacggacgagatagtgagcggagacaagaatcgcatccttagcatcggcggcaacctgctatccaacgctatcaaatttacacaaagcggaacagtcacattaagcacctattatacggatggcacattcacgttgtcggtatcggacactggaacgggaatgacaaaggaacagcaacagcggatattcaccccgtttgagcggctgggcaacgccgtgacggaggacggtttcggattagggcttgccatcgtcaatgatacagtaaaactgctaaaaggaagtattaaggtggaaagcgaaccgggcagtggaagccgcttcaccgtaagcctgcccttgtccaaggcggaggaaacggcttctgttgaaaagaaacaagacagccatgcatcacttttcggttaccacatattagcgattgacaacgatgtcctgttgctcaatatgcttcacgatatgtacaggcaaaatggcgtggaatgcgacgcctgccaaagcgtggatgaactgacagacctgatgcgtacgaaggactacgacttgctgataaccgacttgaagatgccggaagtaaacggctacgaagtattggaactgttgcgcacgtcggaaatcggcaactcgcagactatccccatagtagccgccaccgccgcaggctatgtggaggaagaagaactgaaaaggaaaggttttgccgccgtgctgtacaagccctattccatagacgaactgcttgccgttacggaatgttgcatcaagcggaacaagacaagccgcatagacctttcgccccttctcgctttcggcgacaagcgtagcatattggaaaagctggcgaccacgacacaatccgatatggacgaagtgcgcaaggcggcggaagccaaggacatggaggcgttggataactgggtgcatcatctcagaagctcgtggatgctgataaaggcggaacagccgctgaaagtgctgtatgatgttatccatagggagagcatatcggatgaagaattgagtgcagccatcggtactgtattggcacaaggcagactgattgtagatttggcaaggaaggaggcggaacgatgggacgggtaatcgtgatagaggacaaccacatatttgccgactatgtgtgccgtctgttggcaagcaaaggcttccaaagcgtcagcacctttaactgcaacggcgcacggaaactgtttgccaagatgcaggaggacgacatcgtgcttgccgacatgcgcctgcccgacggtgacggcatcgccttgctggaagaactgcggaaacaaggcaggaacaatccctacatcgtcatgacggagcatggcgaaattcccatcgccgtccggtcgttgaaattgggcgcagaggacttcattcccaaagaccttttggagatgaacctgccgtcactgctccgcagtttgcagaaaaggatggaacggcaagacgcacccattcttgaacgaacaagcggagcgttcaaaaagatatacgacaagataaggctggtcgcgcccaccaacatgagcgtcctgatactgggcgagagcggcacgggcaaggaacacattgccgagaagatacacgcaaggagcaaacggacgacggggcctttcgtacccgtggactgcggcctgctctcaaaggagcttgcagcatccgaactgttcggacacgagaaaggggcgttcacgggagccgaaagcaagaagcaaggcttctgggaggaagccgccggaggcacattgttcctcgatgagataggcaacctgccgcaggaagtgcagcagatgctgctccgcgcgttggaagccaaacggtacagacccacaggcggcagcaaggacaagaaagccgatgtccgcatcatcgccgccaccaacgaggacttacagaccgccatcgccgaaaagcgtttccgtgccgacctctaccaacgtctgaaagaatacaccatacagatacccccgttacgggaatgccgtgaggacataatgccactggcagacttcttcctgcaacttgccaacgatgaatttgaaaagcaggtgaaaggctttgacgcggaggcaagaaaacggatgctcgcctatacgtggggcggcaacgtaagggaactgaaacgggtcgtgcgcatggcggtgctgcataccgaaggcgatacagtcacggcagatacattggaatttgatgaaatgccgttggcggctgacgattcattggcattggacgatatggagaagaaacaaatcatccatgccttggaacaagcaaaaggcaaccgcacattggctgcggcattgctcggcatcgggcgtactacgttgtacaacaagatgaaagcatatgggatagaataatatatcagatattttgcgctcaattcgaaaaatatgtcaagatttagattatttctgaattctatttgctacttttgcatcagttgattgacttattggagataagcagaatggcgaagctcggtggtttctaaaccattacctattctctttttgactgatggtaactttctgatttacagttgtattttatttagtgcaacatttgtcagcgcacaaaacacgaatatgtccctgaccgtttgcaggcggggaatggtgaattcctttttcagaagtatgttcaattcctcttccgtaaggaacgcccggttcgtttttgtttgtttaaaatgaatctccagaaaaggatcgtccgttatccatttgttcacaagcgccacttttattatcttcttgaagtttttcagatattttaccgtggcattctgggcacatgatttttctgtttttacatagtgctcaaaccgggcgatgaactcatggtttatctctttcaaaggtatatcgttcatcctgtattccttttgcagcagttcacccagatacctcgcggtccgttcatagcgcaggacagtcccggcgacataatccttgcccatcaactccctgtactttcggttatgttcctggaaaacctccagcagcatcttcggagagtctccctccccgtaataacgtctttttaagacatcggccgtgatcggcttcccgtcctgctccagttccctgtggatctgtaaaactttcatacggaccgtatccagataatggttcaattccatagatttcctttccttacctatggcacattccttttgggaattccacttggaaatgtccacgcttcttttaatctgtatctcggcccgttgcccgttaactgttatacgcatacaaatgggtgcctctccgttttttaggagtttagacttcttgatgaagaaaagaatcgtaaagtagtttctctgcatagccatactcaaaaaaatgatgttacaaaattaatttttacgagtcggtttcgaaccacgcaaaattcggaaaatcaatgaaatatgatctaattcggtggactttttcaggtagatgtcaagtccacctatttcacctgtgatcatcactgttttttgcggtgaaatgcagtatttggagaaaataaaaatccctgataatgattgattatcagggatttgcttgatttttcttttgttttcagtgatccgcctggggttcgaacccaggaccccatccttaaaagggatgtgctctacctgctgagctagcgaatcattctgtgtgttacttctgtaatgcaaagatagtgattaattttttattgtgcaagtattgattgtgtttttatttgcttttcattcggaaaaacatatatattatagcagattatagttgataatcaatacattcaaaaaatagctttttagaaaatctaaataatattgattatcatttttcggatttatgtaaatcgttgtcgttccatagtattgcaatagcatttatctttattgattaccacaacaggaagtaaacctttttctcgatcataaatgcgttgtgacgttttcattaccatataacgatgatagctgtctacaatttcatatagatctttttcttcaatgtgataacaaacgcatggtataaccatcttcccaaatggaaagttccaataatttcatttccggtggtgccacaatattaggattataactgttggctaccactttgtctatcggtatagctttaactgtgtattgtgtgatggactttgtcatcagctatcacattgtgataaagatcatagtttatccccatcggtaatgcatccacacgggttacacgatcattcatttgaacttcatccagattgaaattcttatgaagaacgcgttttgtcgcactgatgaaatgacgcatataatcgtgaatgtggaaagcgacaaagtcagctcccaaaagttcattcaggatctcgaccctttcgggcagaatccggaaaagttcatgtgaaggaaacggaatatgttggaaatacccgatatgaaggttgggaaacttctcacggagcatgcctggcaacagcattaactgatagtcctgtatccaaacccaatcattaggctcaactatccgagatatctcttcacaaaaaacagcattgacttccctatatgatttccaaaagttttttttatataacgtatatgcaaaaaagtaatgacagaggggccatagggtactgttgctatatccttcgtagtaatttttatactgttcgtcggataagaataccggatgataattatttttttccaattgacagcaaatgtcatctttttccgtcttttgttccacgcagacgccaggccaaccgatccaatgtttttcacaatcaacgtccaatgacttcaaacctgtagccccccttcgctttgtgaaaaaacgaattttccatcggagaaacatgtaatttttacaggcaatctattcgaaacgataaataatctcatatttgatataatatatattaaaatagggcaagattcatgttgatttatgtttattattgatagctagatatttactaaagaataagcctgagatacatttttccaaatgaaaatattttcccaaaatgaaaatttttgatgaacaaagaattgagcaagaaaatttctttcttgttaattcacgagattttaatcgggtgtcttgtctttccaaaaatagagaaagcataccagaatgaaaaaaactttttcgttttggtatgctttctaaaactttcaatttagaattaatattttaaaatcggttgatatatagtgttttatgtttgttgtcgtttaattggtctgattttggcattacccttattagttagatttccgaagaaaatatcattaatattcatattcggttgtcagctataagaaacaatgtaaaacgacaaagaaataaaatggtattttttatttatcagttaggctcgcttgcctctgtatgggcaatcagcaatttaataaaaaaagatgttcctcaaaggatcaaaaacaggattatcattctgttactagtaacaagctggattggcgttttggggtattttttcattctgaaaaataggattgaaaaatggtggcctcgcaagaaatacttggtcgcccataaatggacataagtttcatgttatatattattgcaattaaaattgttttatgtgtaccaaaatctttttctccattcattctgtaaagatttgaattgttttttctttttgagccgtggatataatttattcatggctcattttaaagacttggttctaaaaaacaggatacaaatgggaaagaatatgcggatgaatttttttaagcaacggataacgatagtattactgttggtggttggcgtatatatatatagtagtatcaatgaattctatttctttgaaaaagattattatgaatatctgctgaatacttttgccggaatcactcttttgacagggatcgcctatttgtgttatcccaaaaagaaggcaaacctaaaaaatgaattggtactgaatgaatacaagctggaatatgaaacggagtcaaccgaatcacaatattttatttctgatgcagatgcttggaatacattaagaaaacaattggcaacaacagctcggggatgtgctgttttatatatcaaagagaattgcgaattgcctataatcaataacacggttttagctaaaaagagaaatttcgattgttggaaacctgtctgcgctggacagatatccaaggattttggcgaaatttaaaatgatcataaaaattatatgggaaaaatcttaatcatcgatgacgaaaaacagatgctggcattattgtcccgtattcttgagctagaaggttatgaggtatatcgaacggcaacttgtaaagctggtttaagacaattacaggttaataccccggaggttgttcttcgcgatgtctgtttgccggatggtaatggcatcgaacttatagaccggatgaaaaacatatttccctcggcggagattattcttttaactgctcatggaaagattgaagacagtgtctcggcgataaaaagcagtgcctttgattacttggtaaaaggtgatgacaataacaggatcttttctcttatcgcaaaagagatggagaaagcatccgaagcatttattgtagatataactaccgaaaacaatcacacttaaaaaataatcggtaaatctccggcaatattagaggccgtttcattagcccaaaaagtggcaaaaacggatgcgtctgtattgcagacaggtgaaaccggaacaagaaaatatgttttcgcacgtctgatccataatgatagccagcgaagtgggtagacttttgtcgctataaattgttcttctttcagtaaagatttactcgaaagtgaaatattcggacacacggcaggttttttgccggggcaattacggaaacaaaaggactttttgaggaagcaaatggtggtactatatttttagatgagataggagaaatggatatttctttgcagacccggttgctgcgtgttcttgagaccgggcaatttatgaaaattggtagtacttactctaatacatgtcgatgtccgagttatagtagcaacaaatcgcgatttggaacaagaaatagttaatggaaattttagagaagatttatttaaccgtttatcttctttccatatccatcttcctccattatgggaatggcgggaagatatttttttgtaagagaattcgtatcttctttttcaaaaaaataaggagggaaaagcttctgatatcagaaaaatacatggtagccataaaacgatacccatggaaaggaaatgtcaggaagttaaagaatacggtaaaaagatgtttagttgttacggaggggggaaatactggactatcaatctctgccgttgcagatgctggaattatctgaaaatacggggaataatattggattggacctagccagcgttgaaaagcaccacattcagaaagtcctccaacataccaacggatacaaacctgaagctgctcgtcttctagggatagggttaaccacgctttataggaagatggaaacctatggactataatgtgaagcactttgttcttgtatacctgacaggctgcctgtttaggtagcttgtctttctatgtaccttttcaaaatgaaaaagcaaaaccaatatatcctccatactaactctttcatatcatctttctggtttctcataggtattttatttttcaaaggtcatggctgaggaggaaaaaacggatgtttacccgataggaaacaagtaggcatcggatggcgaacggatacctacccgttcaggaaaatgtcggcatattattcctggaggataagtctttctcgtttttttcaagtaccttttaattacagactttatatcaaaaggaaaagactccagaagcctgaaatgtgaaaataactctcttaaagactggtaaggcaaacaatatgcgattatcctaaaatggaaatatttttttcattttgaaaaggatttagcatgttgcataacaagaatgattttgactatatgtctaataaatagataattacgcatgagttaaaacttttggcacgactttagcatataagaaaacgaaaaaataaatggtattaacaatttaataaaaagaagtatggaagatacgttatcgtttttgttcttgtgtgctaccggtgtagcatgctattggtttttcttcaagtgtgtggactggtttgagaaaatttaatatgagaaaggagaattaaattatgtttttagcactgtttatactttgtgtagtgattttcgggtatttgatgtatgtcctgattaagcccgaaaagttttaatggtaattagtttttaaagtaaaaagatgaacacagaaattttaggtgtagcattgcagatattgctgctgatagttatcagctatccattaggaaagcatatcgccaaggtgtacaaggagggaaacgattgtatgcgtttcatggctccgattgaaagatttatttacaaactggcgggtatcaaccccaacgaagagatggattggaaggtattcctgaaatctctgcttattataaacgtattttggttcttctggggtatgatcctgttggtatcgcaaggatatcttcctttgaaccccgatggaaatagcggacaaagtccggacttggcgttcaatacgtgtattagttttatggttaactgtaacttgcagcactatagcggagaaagcggtttgacttattttacacagttgttcgtcattatgttgttccagttcatcactgctgcgactggtatggcagccatggctggtattatgaaatcgatggcagccaaaacaactaaaacaatcggtaacttctggcactatttagtgatcagctgtacacgtatccttttcccgatgtctctgatcgtaggttttattttgatcctggagggtacaccaatgggcttcgagtctaaaatgacaatcccgacattggaaggatctgaacaaattgtttcacaaggacctacagctgcaattgttccgattaaacagttaggtacgaatggtggtggttatttcggagtaaactcttctcaccctttggaaaacccgacttatctgaccaatattatagaatgctggtctattctaatcattccaatggcattggtatttgctttgggattttatttgaaacgtaaaaagttaggttatgtgatctatggcgtgatgctgtttgcttatcttttaggagtattctgtaacgttcactatgagatggcaggtaatccgaaaattgacgagatgggtattgaccagtcttgcggtgctatggaaggtaaggaaacccgtctgggtccgggtgcaaccgctttgtggtctgtgactacgactgtcacttctaatggctccgttaacggtatgcacgacagtacaatgcctctttccggtatggtcgagatgttgaacatgcagatcaatacatggttcggtggtgtcggtgtaggtttcatgaactactatgcattcctgatcattgccgtattcatcagcggtttgatggtcggacgtacaccggaatttcttggtaagaaggttgaggctcgggaaatgaagatcgctacgatcgtatcattagctcacccgttcgttatcttgatctttaccgcaatttccagctatgtgtgggtatattgtccgggctttgttgagagtgaaggcggttggttaaacaaccccggtttccatggtttcagtgaaatgctatatgaatatacctcttcttccgctaacaacggttccggtttcgaaggattaggagacaatacctatttttggaactatacttgcggtttggcgttgatcatttcacgttatttaccaattgtcggacaggttgctatcgcaggtctattggcaaacaagaaatatactccagaaagtgcgggtacattgaagaccgataccgttacattcggtgtgatgacattctgcgtaatcgtgatcgtagccgcattgtcattcttccctgcacaaacattaggcccgatcgctgaatattttagtatttactaattgacagattaagaagatgagaaataacaaagctgcttctttatttccaaaggagctcgttatagaaagtttgaagcaatcattcgttaagttaaatccgcgggtgatgttccgtaacccgatcatgtttatcgtagaggtggtgacattcgtcatgttgttcgttactatatgggcagtagccacaggcgatacgacgcaaggatctttcggttacaacatgttagtatttattgtattgttcgcaacgctgcttttcgcaaatttcgcagaggcgattgcagaagcacgtggtaaagcacaggccgacagtttgcgtaagactcgtgaagagactccggctcgtttgtgtgtcggtaataagatcgagactgtcagttcttctcagttgaagaaaggcgacatctttatttgtgaagccggcgatacgattccttccgatggtgagatcatcgaaggcctggcttctatcgacgaaagcgccattacgggtgaatctgctccggtgatccgtgaagcaggcggtgacaagagttcggttactggtggtacgaaagtattgtcagatcagattagagtaaaagtcacaactgaaccgggtgaaagtttcttggacaagatgattgctttggtagaaggtgcttcacgccaaaagactccgaacgaaattgccttgacaatcctactggcaggttttacactggtattcgttgttgtttgcggtactttgaaaccgtttgctgattattctaacacgacgattacgatcgctgcctttatctctttgtttgtttgtttgattccgactacgattggtggtttgttgtcagctatcggtattgcaggtatggatcgtgcgttgtctgctaatgtaatcaccaaatccggtaaggcggttgaaacggctggtgatattgatactttactactcgacaagaccggtacaatcacgattggtaatcgcaaagcaacccagttctatccggtatctggcattgatgaacactcttttgtacaggcttgtttgctgtcctctctttctgacgatacgcctgaaggtaagtcaatcgtagaactgggacgtgaaaaaggtgtacgtgtacatgatctgaatacatccggatcgaaaatgatcaaatttacggctgagacaaaatgttcaggtgtagatttggcaaatggtactcgtatccgtaaaggcgctttcgaagccatccgtaagatgagtgaggctgcaggtaacaaatacccgaaagaggttgccgatttagttcagaagatcacgagcaacggtggtactccactggttgtttcacaggacgacttcattatcggtgtgattgaattacaggatattatcaaaccgggtatccaggaacgtttcgagcgtctgcgtaagatgggtgtgaagacggtaatggtaactggtgataacccattgaccgcaaaatatatcgcagaaaaagcaggtgtagacgattatatcgctgaggccaaaccggaagacaagatgaactatatccgtaaggagcaggaaaacggtaagctggtcgctatgatgggtgacggaacgaatgatgctccggctttggctcaagcaaatgttggtgtggcaatgaatagtggtacacaggctgccaaggaagctggtaatatggttgatttggataatgatccaacgaaactgatcgagattgtcgaaattggtaaacagttgctgatgactcgcggaacgctgactactttcagtatagctaacgacgtggctaagtatttcgcgattgttccggctctattcatggttacaatccctgcattggccccaatgaacattatgcacttgcatagcccggaatcagcgatcctgagtgcgatcatcttcaatgcaatcattatcccgattctgatcccactggcgttacgcggtgtggcttataaaccgattggtgcttctgcattgcttcgtcgcaacttgctgatttacggtttgggcggtgtgattgtcccgttcattggtattaagttgatagatatgattgtaagtttattcatgtaaaagtaaaatcaatattaaaaaccttccttcctctgtatgaagataggaggaaggttaagaaaataaaataataattcattatgatatcaaatctttttaaatcattaagactgacaattgcgttttgtttgttcttcagtgttttctacatcttcgttttgtggttgtttgcccaagtggcaggaccgaataagggcaatgctgaactggttacattgaatggaaaagtagtgggggctgccaatgttggtcagaattttacacaagatatttatttctggggccgtccttcccatgctggtgacggttacgatgcatccagttcggcaggtagtaacaagggaccttccaatgaagaacatttggccttgttggaagaacgtattgatacatttttggtccatcatccttacctaacccgtgaaaaagttccggctgaaatcatcacggccagtagctccggtttggatccacatatctcaccgaaagccgcttatgtacaggctaaacgtgtagcggacgctcgtggttggtcggaagaaaaggtgatgacaatcgtgaactcacatgttgagaaacctttattgggcatgttcggtacagaaaaagtaaacgtgttgaaattaaacgttgcgcttgataaagctgctgaaaacaaataacagttatttaatagataaattagatttaaggttatgaaatcatttgtaaaaaaagtaactgttttggcggttgcattctcaatggcatcttctacattggctaatgcacaggaagaggatggtaaggtaaatttttccgtacagggagatttggtaagttcttatatttggcgtggtttttaccagactggtgccagctttcaaccaacattatctttaggcgtaggtaatttctctttgacagcttgggggtctactgatttccagggtgccaattccacgtcagcagctgcggctaaagaaatagatttgacggctgcttatacattcggatcggcaggtcctacattgtctgtcgctagcttatggtgggcaggacaaggtgccggtgactactttaacttcaagagccacgaaacagctcaccattttgaagcaggtttggcttacactttacctattgagaagttcccgttgtctatcacttggaatttcatgtttgccggtcaagataaagatgaaaatggaaaccaaaactattcttcttatgtagagttgaacttcccgttcacagtgaagggagttgatctgaatgcaacttgtggtgttcttccatacgatgcgggagtaactacgtatggaggtgatgtaaatagtggatttgctgtaacgaacgttgcattgaaagcaatgaaagatatcaaaatcacgaattctttctcattacccatttttatacaggcaatttggaaccctcgtatggaggatgctcatcttgtcttgggaatttctttaagaccttgatatagtatacgcatggaccgagaacaaagtgtacaacattttttggatttgttgaaaaagtctcgtcgtggcaattttaaaatctacatcggcatgattgccggtgtaggtaaatcgtatcggatgctatcagatgcccaccaattactggaaagcggtatcgatgtcaagatcggttatatagaaacacatgggagagtcgagacagaggcattggtggaaggactgcctgtcattccacgtcgtaaaatattttataaaggaaaagagatcgaagagatggacttacagtcaattctcagtattcatcctgaagttgttatcgttgacgaattggctcataccaatgtcgaaggcagtaagaatgaaaaacgttggcaggatgttatggatatactggatgccggtatcagtgtaattacggcagttaatattcagcatatagaaggattaaacgagatggtgcaggacgtggtaggcattgaggtcaaggagcgtattcctgatatcgtactggagcaggcggatgaagtagtcaatatagaccttactgctgacgaactgctggctcggttaaaagccggaaaaatatacaaacctgataagatacaaacagcattgaataatttctttaaggctgagcatattcttcagcttagggaattggcattgaaagaggttgctttgcgggtagaaaaaaaagtggaaagtactattcctgagaatcttggcgtgcgacatgaaaggtttatggcctgtatcagcagtaatgagaaaacccctcgtaagatcatacggaaagtcgcgcggttggctacccgatataacaccaagttctttgtattgtatgtacaaacccctagggaaagttcggaccggatttcgttggcaagccaaagacatttactgaaccatttcaagctggcaacagaactcggaggagaagttattcaagtgcaatccccacatataacggatgcgatagtgcaggcttgtaaagaaaaacaaatcagtacattatgtattggacgaccgactttaaaatacccttccgttatccttgctatggttcattatcggaacatgttagaagaattagctcaattaggtattgatttgataatattagcttaaaaaatccttatataaaaatgaatataaaaacaaagttgacttatggaatagggcttttatttgtcttgatcactttattagggggattggctataaaaaacattcataatgtatcagatgacacgcagaatattctggcggataattataattcactcctttattcccgtcagatgcttgagtcattggatgccattcgggaaaatccgaatgcccgaaaaaactttgaggccgggttggaggctcagagaaacaatctgacagagaaggatgaagatgtactgaccaaccggtttagttcgtactgtgaaaaggcattggatgacatggatgatgaatcgattcggcaaatacgccagacgatctataccattatggcggtcaatatgtctgccatttatgaaaagaatgaagtggctgtccacacagcgaaaagatctctttttgggatctggacggtagggattgcttgtatcacgatcgctttcctctttctggttcgtttaccacgttcggtcagcgtacagatccggaaattgacggatggcatcaaggaaatcaccaatgccaattacagtaagcggctcgatttggggaatgagccggagttcaaggaaatagctacattgtttaacgagatggctgagcgattggccgaatacaggaacagttcgctggaagatatcctgcaggggaaaaaatatatagaaacaattatcaacagcatagcagaacctatcataggcttgagtaaggaacggaagattttgtttgtcaatgacgaggctttgactgttttgaatttgacgcgggaaaacattattggcaggccggctcccgaagtggcgttaaaaaatgatttgctccgccgtttgattcggcaattagttcatcccgatgacaataaggacccgttgaaaatttacgcagacaataaagaaagctattttcaggtaaaatacattccgatcaacgtcaacaagcagaccggactagagagtaagtatgtcggggatgtgatcttgttgaagaacgtgaccgaatttaaagaaaaagatattgcaaagacaacctttatttcgacgatctcccatgaactgaaaacaccgatatcagctattatgatgagcttgaaattactggaagataacaggataggaaagctaaatacagaacaggagagcctttctaggaacataaaggagaatagcgatcgtttgttggagatcactagtgaattgttgaagatgtcacaggtagagagtggtaagctctatttgaatccgaagattaccaaaccgatcgaactgattaactatgccattaaggcgaaccaggtacaagccgagcgttttaactgtcagatcgaagtggaatatcccgaaaagattgccaagttgtttgttgacagcgagaagattgcttgggttgtgaccaatctgttgtcgaacgccatccgttattcatcggagaacgggaggatcgtcatcggtgcacgacagatcgacaaagccgtcgagatttatgtcaaggacttcggaaagggcattgatttgcgttaccacgaaagtatttttgatcactatttccgtgtcccaggaacaaaagtacaaggtagtggtttaggacttgccatcagcaaggactttgtggaagctcatggtggtacgatccatatcgaaagcgaagtcggtaaaggtagtacgtttgtggttagatttaatgtataaaaagtaaaatcaaaaattagatagtctaatgaaagtattaaaatttggtggtacttcagtcggttctgcccagcggatcaagaatgttgcgtcaatagtttgcgatcaggaacagaaaatagtagtgctctctgctatggctgggacaacaaactctttagtggagatatctgaatgttttcacaaaaaagatccggaaaaagccaatgcggtcctttcttccttggagcaggcttatgtcaatcatatagaagaattataccggagcgatgtctacaaggaaaaagccatgcaatacatgctcgaacggcttcaacatgtctggtctttctcaaatatgcctttcagcgtattcgatgaaaaggaaatcttggtgcagggtgagttgatatcgacttttctgatggcctgttatctggaagaacagggggtggaggttgttttattgcctgcgttgaacttcatgcggattacggtggacaatgaaccggatatggaatatatctctaaacacctaaaggttcttttggagcaaaacaaggaggctgaaatatatatcacgcaaggttttatttgccggaatgcctacggcagtattgacaacttggaaaggggaggaagtgattacaccgcctctttaatcggagcggctattcaagcagaagagatacagatatggacggatattgacggaatgcataataatgacccacggtttgtcaatgataccgctcctgtcagacaattgaacttcgacgaagcagccaagttggcgcatttcggtgctaagatactgcatccggcttgtatcctacctgccaaggaaaagaacattccggtacgccttttgaacgcgttgcaaccaagtgcgtcaggtacattgatctcgaacactgctgaaaaagaggcgatcaaagctgttgccgccaaagacaatatcacatatgtcaagatcaagtcgctacatacgataccgacacctcattttctgagcatcgtgtttgatacattctataattacaatacaccggtggacatggtgactacttctgatatcggagtttccgtagcgattgataatgacaagcacatagacgagattgtgggtgtattaagggaatacgcaacgattacagtcgaaaagaatatggtgattgtttgtgttgttggtgacttggaatggcaaaatgtcggttttgaggcacgcatcatcaatgcgttgaaagatattcccgtacgaatgatttcatacggtggtagtagtagtaacgtatcgttggtgatgaaagcggaggataaagtgcatgccttaaaggcgctcagtgaacacctattttccgtatctgacatttattaaatataacagatttgattcctttatcaaatgtttgggagggacaccaaatctgttgaacaattatatgaaaaacagaaagagaaggaaatgttggaagatcaagatgcctctgttcattctgttatcttttggtatagacaaaatataatgaagtgaattctaaatgtttttgtataacttttaggattcacttctgtatccatctactatttaacaatatatattatttcttataacccgctaaaatcgaccccgtcgaatattagagaaggaacacgccaactggagaatgtgcgcgggtcattgccgacttcggctaaattactccacaaggaaatcatgttgcctgttgcgttcatttcggagatgggttgtgtcagtttgcctttttcgatcaggaaaccttctacaccgtaagagaagtcaccggtcgtactgttgctgttaccgccgttgaaacccgtcaccagaatgcctctgtcgacagaagcaatcagaccatccgtatccttatttcccatttgcatggtcaggatagaaggggaggcaatcgtttgtctcatattcatcttgttggctgaataggtatcgatataataggttttcaggataccgttttcaaacacaggcatacgttttgtcgctacaccttcgccatcgaaatatcgggcaccggatgtgccctccatgtggggttcatcgataaccgttagtttgtcacccaatactttctggtcgattttatccaacaaaaaagagtttttctgctggatggaagaaccatataatgcatcgattaccggagaaagcaaacgggaggaattcatattgtctacaaccatctgatacttgccggaagcgacctttttctgtcccagtttacgcattacacgttccagggcctttgttcccagaccttctttaattaacttatcatagtaaagtgaagaatcgaaccaataggattccgggcgagcatccccttcacctttgatgcttacgctggcaactaggctgaaagaagaaccggatgcttccccttcgaagccgttgctggcaaccatatatttgaaatccttttcatcgctgtaggatgaattgaccgagataatacgggggtcttttcccatcatttcgttgcagacgttcatggccagcgtcactttgtcgtccggctggattgagtcgaacttcggatcgatcagttgcaagtcggcgccgcctcctttataatagagagaagagtcgggtaacgtacgcgccttgtcttccgccaggaagcgagtggaagcgataccgttacggataaaactttccagttcctttttatccagacggtttgtagagaaggaaccgaaacgtccgtccacaaacagatggatcaccaaactgttttccgatgcctgttgcaagcggtccattttcatatcacgtatttcgaaggaactgctcgatccattatagatacttacacgtgaggcctggcaaccgtttttcagggcaaattccatggcccactgagccagttttttattttcgttcgttatcatgtctaatgatttatgattttagatttatgatttatgactttggatttatgatttatgggtgtgtagacaacgcataaatcataaatcataaatctttttaattttctcctcctacagtaagtttactaactaaggctgacggcataccgcaggttaccggacaggattgtccgtccttgccgcatgtccaggtgccgttatccatcttgtaattgtttccgaccatcgtgatatcggccaatgcacgtggaccgttaccgatgatattgatatctttgatcggctgtgtcagtttaccattttcgattagataaccgtctttcacgaagaaggtgaagtcgcccgcaccgatctgtacttgcccgttggtaaagctagaggcatagatacctttcttcaccgtcgagatcatttcttcttccgtcacgtttccggcttccatataggtagcgcgcatacgcgggatcggcatctggcggaatgattcacggcgaccgttccccgttgaaggtataccgtaatgtttggcactgatacggtcgtgcaggtagctggtcagaatgccttctttcacgatataagtcttttgcccggcgataccttcgtcatcgatattgacagaaccgcggttgaaaggaatcgtaccgtcgtccaccacattgatatgctcgttacaaacctttttgttcagctggtcggagaagatcgatgtattcttgcgattgaagtcagcttcgaaagcatggccgatagcttcgtgcaacaagatgccggaacctcctgcacccattacgaccggcatttcgcctcctttaggcttgatagcttggaataggatggaggttttctctactgcctccttagctacttcggcaatgatatcatctgtcaggaattcggctcccatgcggaaagcgcgggatgcatatgaattttcgatcttcccgttgtcctccatgatacagactgcccccagcgtcaccatcggacgatagtcgtagtacatctgtccttcggagttgcagaacaagatgtgtgaagtcgtgtctcccaacgaagccatcactttgtgcacccgtttgtcaagcgcaaaaatctgatcgttcagtttctgaagatacggggtctttgcatttacggcgagctcgtcccaaggagtttgtacaccgtaataattattcgggatcggttcctccgtcagggcaaccggagcttttcctgccgagccggttgcgatacgggctgccgtgcgggcagctttcagcatctcgtcgagagtcacgttttccacatacgcataaccggtctgatcaccggccaatacacgtactcccataccgaaatcgatattggacgaagcacggtttacggctccgtcttgcaatccgatattgttccggtaggaatgttcaaagaaaagatctgcatagtcgcctcctttctcaagtgctgctgccaacactttcttcatgtcgctttcactgacaccaaaatggttctgagcgaatgagataccggtagcctgatctaccttgtttccggtacaacttcccaggaatgagggaactgctaatgatccaagcataaccatacctcctgttttgataaaatcacgtctgttgattttcatatgttcgattatagtttattctcttttgcccattgcatgacgttggctggcgggcgttcggccaacaattcttttttcatgaaatccatgtaaggagccacgtgcttaaaaaatttcttgtaacctctacatagatagttcaatccgggttcgccgtttgccgtatggagaaaacggttcttgggacattcgccgttgcaggcaaacaggtagtcacactccttgcattgggtagggagtgtttcatatttgtctgctccgaacttcagttggcgttggctgtacatcatctcggtaagcgtctgggtatggatgttacctaacttatattccgggaatacaaagtggtcgcaggcatatacgtcgccattgaactccatcacaccggcatgtccgcaagtgcgtgccagcgtacagacgcccggttgttcgcctacccagtttgccagtgtggagtcgaaaagctggatataataattaccgacatcctctttcagccattcgtcgaagaccgcacagaggaaatctccccattttccggcgtcgaccgtgaaaggggccagtttgatgttggcatcctgctgttccggcgaggtgagcaacgttccgtcctgatggaatccgaggcgttctacaatcggggtgaattggatatagtggcaatctatttccttgaaaaagtgatagaattccagcggataatctacgttgtagtcattgacgactgccattgcgttgtattccacgccatgctttttcagcagttcgattcccttcatcactttatagaaggaggggagtccctgcttgttgcgacgatattcgtcatgaaactcctgcgggccgtctatcgaaactcccacgaggaagttgttctctttgaagaaacgacaccagtcgtcgttcagcagtgtcccgtttgtctggatgcagttgtctatctggcgtctgtggccgtacttgcgttgcaattccagtgctttccgatagaaactgatcggacgcatcagcgtttcaccaccgtgccaggtaaagagaacctgcggcatcgtctgacattccagatattccttgatgaatttttccagtaactgttcgctcatgatatgatttttcacctctggataaagtttccctttctccagataataacagtattcgcacgccaggttgcaaactgaaccgacaggcttcaacattacatatacgggtttcgcgaacggggatatatatggattactcatggtatgcttaaaacgatgttttatttagtttcatatgcaaaagtaatctttttaacggatgaatgttgtttttttaccgtgtttttttcttgtagcggttgtaatcggtgacaaatccttcgcaaagccaattcgcgagtgcctggcggttgtcgctcaggatgattcgctgctggtcgaaactgttttggatattacctaactcgacgaaaacggaggccggtgtcgtatgtctcaacacgtataagttccgtccgtccactgttccggtaaatcctcgtcccggctggtgcttcttatatttatgggtgaaagttgtccgcatggttttcgccagatgcttgctttcggagtttttattctggtggtagaaaaaaacatcggtctggtgtcccttgttccggctgtccacatgcacgaagatagctcgtttgtaggcgtatttatcctgcttgaacagggtgtttatcttgtcacttcgttgtttcaggcgacggacctggttaaaaggaatagggctacccatacaagtttcccgtttactgttcttcaggtatttgtcatcccgtatcccgtctttggcatcttgaatgataatgtggactttggctccttttgtcatcaggttgcgtgccagacggagtacgatgtcgtaggcatattcgtcttcgtgcaactcgattttgccaatccgtccgattgctccaggatcagggcctccgtgtccgctgaccagatagaaacaggctccttttagttcggacgatgttaccttataggaggccagttctttgccgaacaacggttcatagttcgctcgtttgatggcggatgcaacagcttcttttccctgtaaggggggaagcgtatatttgactcctatcctaagggtattccccttgcctaacttgtttttgttcagctcgatgaactgtttctgatatgaaatacctgtacggttatggcgtttgaggaacagggtgatgccttctcctttcttgggaaaggctttttcctgggcctgtaaacggttgacgcaaaatatggtaaaaaataacgcgaatatgatattaagtttaaacttcattggagacatgttgctaatgcgaacaaaaataacgctttttcgggattatgcaaaatatacggttattatcaggcggagcagcatgtcctagtagtatcataggcaggaagagtttgtgccatgtcgatgaaacggttgtgccatgctgatgaaacagttgtgccatactggtgaaacggtcgtgccatgccgatggaattattgtggcaaaggcatgaagctttatttttatggtttgtctgcttttgttcgcctgagttcaggaaatatctcagatcaaatgattcatcgccatgtatttccaaagtggggcggcatggagcgcttgtttgatctggtcgtttagcaacaattcttttacttcgtcgagagtcagaaggtggacgctgaggtcttccgtatcttccagatgttgtgccatgactgactctacatctgtggcaagatagcaataagtcaggttggtgtgggtgctcggattgacgcctattaccattagttcgctccaatttccgttgccgtagccggtctcttcgagcaattcccgttgggcggagacgagtgaggaagcgtcttccttttcgcagacaccggcgcaaagttcgtaagccgtgatacccagtccatgacggtattggcttacaaatacgaatttctgctctttggtgattgcgatcacattgatccattctggatattcgaatatataatattcaggaatcctgtttccgttcggcaattccacttcctccctgcgcacggtgaaccaaggttggctggagaggtattcacttttcagtactttccagtttctgtttttcggagtttccatatttgtagtttgttgatggtgtgtatcaaaatatataattatgaaacggtcgagtttgtaataaattgtatttgtacttatctttgtagcttcgaaagagaggacttagatgaataaagataataatttcggcaggcttttgctcctgctacttcttgcgtttggtatctgcttgggactttattacttaccggaccagctgttcgggatgaaaataaaaaaagttgatttactttccgatctcaggataaaaccagaatccctgtctatggattccttgcgtatgcaattggaacaaccggatacggtccggatagattcggccgccgtgcgtgattcgatcctgaaaacgactggtatcgattccgtcgccctcgcattacgcgattcgctttacaaggttatgtatgcagacaagggagccgattcgttgggaacgcgtatcgaagattactctgtcggccatatcggtttgaaacgtttttttgccgctttaagaaatagcaggcaggcgaaccgcccggtgcgtgtcgcctttttgggtgattcgtttatcgaaggtgacattgtggtggctgattttcgttcgggtatgcaggagcggttcggaggacgcggagtcggtttcgttccggttacgtcggtagccgcccagttccgtccgacgatcgagcaaaaggcggaaggttggaccacctggtccatgttgacggatcatcatcatcggtatacgctttccggaatgacgttcgaaccgaaaggggagaagccatctatctcgatcaagacgacagaccgttatccggagttgaaaacggtttcttcccttaaattcttgtatgaaaagaatatccgtacacagatgactttggtttgcaacggcacgcaggacacgatctgcgagactttggaaccgacaaccgccatcacgcaatacgaacaaacaggaacctttacagaagcctccttcagctttgccgatacggccggtttccgtgctctcggggttgcactcgaagataattctggggtgatcgtggacaattattcgttgcgtggcaattcggggatgatcctttcgagattggacagcacccgttgccgagagttgaacgagatacgtccctatgatctggtcgttttgcagtacgggttgaatatcgtcagcgacagcgttctccagtatggctggtacgccaagcggatggaagaagccgtacgccacgtacgcgtttgttttccggatgccgatatcctgatgctgggggtttcggacaggagccgacaagtggacggaaccttcgaaacgatgcctgccgtattagccttgctgcacgcacagcggcaggcggctcgccgttcgggggtcgctttctggaatgtctttggggcgatgggaggagagaacagcatgatccgtttcgtggagaacaattgggctagcaaagactatacccatttgagtttcaggggaggaaaagagatagcttctgccttgttgaaggcaatattattagaaaaggagttttatgatgaagcagacaaagtggctcattagtctatcggcttgcctggttttgatggccgccagttctgccggagtgaaaggaaaattggcgatcccgtgtcaagcgtgggaacaggggagtattgatacgatcccgcttccttcccgcatttattcgatcgggaaggaggtcgattcgatccagtcgccctcttcgctgcaatccttctttgacgaactggattcgctcggagcggggaaggataccgtattgacaatcgtccatttaggcgattctcacatacaggccggttattattccggtaaagtgatgcgtcttttgcaggcgcagttcgggaatgccggacgtggatggattgcccctttcaagttgagcaagacgaatgagccggacgattatttcatctcttcttccgtccgcgaatgggtgacgggacgctgtatccaagccaataagaaatgtcctgttggaatcggtggaatcggtatccagtccgtttctccttccatcaatttggacgttcggatagcgcctaacaacggggcaggctattccttcaaccaggcgatcctttaccggggagaaaaagccatgcctatgttgccggccggttcgttcaaagattccatacagacatccttggctacggttccggctgtcgcaggtgtcttggccgataccttccgtatttctcatccggtagatacgttgcagctgcacagtacccggcggaaacaaggcacggataagctgcttccggcctccaatttcaaaaatgtttattatggtttcagcctgacgaacggttatccgggtgtcctttaccattcggtcggcgtgaacggggcgatgtatgtcaattacacagacgaagcatacgttcgtcagttggccctgttgaaaccttctttgctgattatttcgttgggtacgaacgaaaccttcggccgtcgcttccgttcggaagaatttggcggacagatacgtgcgttcgtttccctcgtcaagaaacagatgcctgaaacggctattctgctcaccactccgccggaatgctacaagcggacttatgtcaataaaaaacggacgtatgtccgtaactcgaatacccaacttgctgcaaaggcgattgtaaaggcggcacgtgaagagggcgtagcttgctgggatctctttgccgctacgggagggaaaagctcctgcaccaaatggcgcaaggaaaaactgatgggccgtgaccgtattcatttcacaaaggatggctatcgtgagcaagggaccttgttatatcgtgccctaatgcaatcttataatcaaatgttgaaaatcagaaaagatgatgaatgattttataaataaaatgggagaatattggtctcagctctcattcgacaaacttggcgatatattgacctaccatcacaatgctccgatacttttcagcagcggattgtttttcttcctttttatcggtttcctgattatttatatgtcgctcaggaagcatttgctgacgcgtatcatttatgttacgttgttttccatctatttctattataagagcagcggattgtttttctttctcctgctgtttgtcgcaacatccgatttttgcattgcgcagtgtatgactaagactgcttccaagtggggacgcaaagcatgggttgtcctgagcctgtgcgttgacttagggctgttgggatatttcaaatacttcaatttcctacgggagatcatggctgccgttgctcatgagttggggtatcagttagggaatacctcgttgcagaacattacctatcagccgttggatatatttctgccggtcggcatttccttctttaccttccagaccatcagctacgtgattgatgtgtaccggggtaggatagcccccctccggcgttggatcgactatgttttctatgtctccttcttcccgcagctggtggccggtccaatcgttcgggcacgcgattttattcctcagatttataagactccggttgttacgcgggcggagttcggagaggggctttttctcgtcttatgtgggctctttaagaaaaccgtcatatccgactatatcagcttgaacttcgtcgaccgcatattcgatgctcctttgctctatacaggggtggaaaatctgttgggtgtgtatggttatgccttgcagatctattgcgatttttccggctattcggatatggcgatcgggattgcattgttgttaggtttccgttttaacgtgaatttcgattcgccttaccagtcggcgaccattacggaattctggcgacgttggcatatctcgctctcttcttggttgaaagactatttgtatatttcactcggaggtaatcggaaagggaaaatacggacatacatcaacctgctgataacgatgttgttgggcggtttatggcacggagcctccgtgagttttatcctttggggcgccctgcatggagttgcactggccgtccataagttcgtgatgaaccatttcagcagtttcaaaccattaggatcagaaatgaaaccctggagaagagtgataggtgttctgatcactttccatctggtgtgctttggctggattctgttccgggctgactcgatgcaaacggttggcgaggtgctgacgcagattttcacgaatttccatccggaggtttttatgcagtttgtggtgggctataaaggagtgttcgtcttgatggtggtgggttatatcctgcatttcatgccgaaatcggcggaaaacggtttgcaggcagtcgttacccgttctcctttgcttgtgcaggcggtgatgctggcgattgcgatctttgttgtcgtgcagttcaagagtgccggggtgcaaccatttatctacttccagttctgacattgtttcctgccatatcgggaatccgatggaagcagagtttaataacaaagaaggtgtctgaaaattgagggcactgaaaaagtttccttgcagctttttaaagaattaaatctgcacatagcctgtatattatttggctatgtgcagattttttgtaccttaatgccataatatttaaggtccatgctatcaccacaacaagaacttccgctcagtgaatatagttcactctacgatatagttgtcccccaagacaatcttcttcgccgcattaatgatcttgtagatttcacttttgtctatcaggaacttgccaataagtattgcaaggataatggtcgaacagcagaatcccctattcgcatgttcaagtatcttctgctgaagaccatatacgatatttccgacgtagatgtcgtagagcgttcccgttatgatatgtcctttaagtatttccttggcatggctccagaggaagacgttattaatgccagcagtctttgtaagttccgcaagttacggctggaagacatggatcttatgaacctgctaatccagaagagcgtagaaatagcgatagagaaaggcatcataaaatcaaggacaattattgtagatgctactcatacagaagccaggtctaacccgtactccccgatagagattctgcgactccgttcaaagcaactccgtaaggtactttatgccatggatgataatatcacgcaaaccctgccgtctaagaataaagaggatgatcttgcgcatgagttggattataccaaagaccttctgaaacttatcacttcagatgccagtctttcagaagtgcctgcagtaaagcagcgacttaacatgctcaaggaaacgctttcagatatagaggatcactatacgacctcaaaggatgcagatgcccgcattggtcataaaacagaggacagttcgtttttcggatataagactcacattgcaatgagtgatgatcgtatcataacagccgcaactgttacttctggcgaaaagggcgatgggcctcagttgaaagagcttgtggagcaaagcagaaaaaacggaatggaagtgaacactgtcattggtgataccgcatactccggatcggaaaaccttagactggcagaagatgaagagaagggatttactttggtatcaaaattacatccggccataagtcatggactcaggaaagatgaagacaagtttaattataacaaggatgcaggcatgtttgtttgtcctgccggtcatatggcaatcagaaaagcaaggcaggggaaaaaggatgggaaatggaatcaatccatgacttatttctttgatatagagaaatgcaagacttgttcacgaagagaaggatgctacaaggagggggctaaaagcaagacctatagtatacctatcaggaatgaagaacagaaaaggcagcttggattccagaaatcacaagaatttaaagatatagctcgtcaaagatacaagattgaggcaaagaatgcagaattaaagcaggtatacggttatgataaggcactgtcgtatgggctggatggtatgcagatgcaaggtgctatgaccatctttgccgcaaatatcaagagaatattgaaactaagctaaaaacacttataaaaattacccacgtataatatgatggccttactgactatacaaggccgaatataaactcctatcaagatatataaaagcagattgcaaaaccgatataaaggctaatacaatctgctttcgtctttttaaagattgggattaaatcttaagaggatacctttttcagtgccctctgaaaaggcagccttctttttttgttatgcagcccgtttattatccatttttatatttaaaaggcactataaaatattttgtgtaaatggaaaatacgggattcaagtttgagtttcgtattttttattttatagatttgcaaaatgaagaagattatgaaagaaaagaatcaagtagtgcccgatgaggtgttaagcaaggagttccttagccagttcaagacagaagcggatgtgagcaagtttctgaaacagttgcatgcccaggtgctggagaagatgcttgaaggcgaaatggatgcccatttgggctatgaaaagaattctgtgacagggaacaataccggcaactcccggaatggcagttatccgaagaaaatccagaccgaacatggagagtctgtcatttctattccacgtgaccgtaacggccagtttgagccgatagcagtgcccaaacatgaaagtcgtggactttctatagaaaagctcgttatctccctatacgccaaaggaatgagcgtttctgacatagaggaagagatgcgtgagatttatgaaatagagctctctacatcggccatttccatcattaccaacaaagtcaatcaggctgcccaggagtggcagaaccgtccccttgatcctgtttacctgatagtctggatggacggtattgtcttcaaggtacgggataacggcaagatcataaacaagaccgtttacctttgcgtcggactgaaacagaacggcctgaaggaagttcttggcatgtgggttggcaaatcggaaagctcttctttctggatgggcgtcctgaccgacttaaaagcccgtggagtgcaggatatactgattacctgtaccgacaatctgaatggatttacggatactatccgcagtgtattccctcagtcatccactcaaatctgtgtggtacatcagatcagaaattcctgtaaatatgtcgtttataaggataagaaagagtttacagcggatatgaagaatatctataatgcacccaacaaagaggttgcagccacagaacttgacaatctggaaaagaaatggggaggaaagtatccttatgctatactttcatggagaaacaactgggatgatttgactgttttcttccaattcccgctggaaatcagaaaaataatctacacaaccaatctcattgagaacctgaatggaaaaatcagaaagtacacgaaatcaaagctttcatttccttcggacgatgctgtaaaaaagaccgtatatctttcgcttatggagattgaaaagaaatggacaatgcctatttcaaacaggggcttgattatgaatcaatttatgcttatgtttgaaaacagaatccagatataagaacaaacttacaactgaatcctgttttcatttacacaaaattctggacagtgtcatttaaaatatctttggtcttctcaattattacttttcgagaagtcatcctacagaaataagtaaaaaacaaaagaaaactgacttttttagccagtttcctgagattatgtgcaatagcaaccagggtaaattctgtttttaccttctccagccctcttaatctaaaccggttccacgccgagttatgctttatttgtgcaaaggcagcttccggttctatacatcgtctgccccgatgataaataccttcctcactcatgagtctttcccgtgctttttgtttatacctgttaaggttatagttaacttctatgatccggttggcctttgatttatgacattgagacttcagcgggcaaccctcgcagttctgtgcctgataacgcttcagtatggatacatatcccaaatcggacttacttttcctttgacctttatattccatatgttgtcccatcgggcatacgtaataatccctttcccggttgtagtaaaggttctgtatggcaaaagcatccttcttccaggcacgcttctgctctttgtgaaaataattgtacttgacaaaagcctctatacccgcattctccataaactcgtagttttgttcacttccataaccggcatcggccactactatagaggattgcctatgataagtctctcgaaaatctttcaaaaaagaaattaaagttcccgtatctccggctcgcctgtaaattcccagattggtaataaattgattctctgtagcaatctgtatgttataggcaggtttcaattgcccgtttttcatatgatcctctttcatgcgcatgaaggtcgcatcctcatctgtcttactgaaagaattacgatcccctaatttctctaattgcgattcgtatttggcaaggcggggcagatattcttcctgtaactttttgatttgtttctgctcagctttgttcatcccggagagccgtttgtttaaagcgcccactttttcccgcaaaccacaggaatccatatccggtaagctatccggtgtcctttcctgtttatcctgctcgatatgtttgtcaacctcactaaggattgactgtattttcgactccagttttaccttgttcttttccacgctaccacgccagacaaaagtgtagcggttggatgctgattccactttggtaccatcgatatactgtacatccaaactgacatagccggattcctgtaacagcagaacaatggctgaaaacaacgattttatgtgttcttttaaacgtttgccgcggaaatcattgatcgtgcggaaatcgggagtactattaccagacaaccacatgaagtgaatattctcctgcaaggccttttctattttacgacaagaatagatattgttcagaggtaggcataaaacagaactttgagcatcatacggggatggtagctgctggtacctcctcctttatatgcccagagcagacaactaatatccaaggcgtctacaacactgtttacaacacgaacgggatgattgggagctatcttttccgataagctgaccggaaaaagtacattttggttggatgttaactctttaaatactatcttagccattgctataatgtttggtttttgcaacggtaagataatactttttaccgaaataaacaatagcaaaaggggctatccgactttttggacagccccttcgttattaaatgtaggagagatcagagtccggcttgcgggtcgaacgtcccgttttcccagcctttcgtctgttccaggttcggattgttactcatctcgctgcgtttcatcggcaggaagtagatgttctggttggtgatcatcggcgtgttatcacggtcgaacagataggtcgtgtatgtattatcggcctgcttgttcatcactaaggcatggcgtttgccttgcccgttcatcaaattgtcgtagatcatccagcggcgcatatcccataaacgtttttgttcgaacaacaattcgataaaacgttcttcgcgaactgcttcacgcatttccgtctggttcatgtttgggttcaatccgtaaactttgcctttcatttccggattggaactagtttcattgatgcctgcacgcttgcggatctgtttcaacatatcgaatgcttcgtttgtctttccgacctcgacggcagcttcggcatagttcagcattacttcggccaggcgaatgtcaatatagtcggttccagatttttggcagtctgtcactgaaaggctttcgtcaatggctttacgggaataatagccggttttcgatccgacgtttttgccgtaggcatagtcgttttgcgcattttcgttcagttccattacggtattgaaatatgtcaccccctgatagacgattgtcgcataaaaacgtttgtcccgattttcccacaaggcgaagatatctttgccttccttttcccaatcggcataggtgtaagttcctccgtctatagtagggaagcggtcaatcacttcctgtgtcgggtgattaccgccggtgttgttcatcgagaacgtgatcggacggacggttgcatctcttttctgtgtgcgggtcgggttttcgtagcggatggcaaaaattacctctttgttcatctcatctaggaacagttttccgtaatcatcatacaaggcatggccttgtccgatcaggtaattcagtgtctctttgttgtagttgtaggcggtttgccaatgttcgttgttgttgttcgggttgaactgtggactagcacggaacaagaatacgcgtccgaggaatgctttggctgcacctttcgtcacgcggcccaagtcttcagccgaataagagtctggcaacccttctgcacaagctttcagttcgtcgataatgaaatcgaaacattcttttgtagagttacgtttcacatagaggtcgtccgtcatttcttgcgggatagtgatcagtgggacaccaccgtaacgtttgaccatttcgaaatagaggtaagcacgaatgaaacgggcttcgtaagttagacggtcggctagttcacggtctatcgtacagacttcgggattctgtgcattctgaatgaaaatattgcagtttcggatgtcagaatagggccagtaccaggtcggggcggaatctttcgtgtcactcatattgtccggtgtggtggttccctgtgtccagttgcctccgcccgtcgcttcgtcggtcgcatcggccacggccgtgtcccagcttgggatggaaacatacaaagcattgagaaaagctgtagtcagcgttttgtcaacccaaaccttgtcctccgagattgaacttaggtcttccttatccagtacgctggtgcaggaagagaataatgccagaatggcagcacatgttataaatatctttttcatatctaattactcaaattgttagaaacttacattgataccaaagttgaaactttttgtcaacggatactgataagctccacggtcaccgctgttttcgggatcgtagatgccgatgtggtcgaatacgaacaggtttgtgcctgaaacgtagacacggcaacgatctacaccgatcgaattcacccactgtttcggcaacgtatagccgagctcgatgtttttgcaacggaaatagttaccgttcatcaaccagaatgaagatgcctgtccgttggcgcctttcgagcctgtaccaccgacgcgcggatatttaccgtctgtgttgtcgggtgaataagcgtccgaccatatgttcagaacggtctgttctgtccaggtatcaccgcggttcgggaacatgatgcttcgatggcctacgccttggaagaaggctgtgaagtcgatacctttccattcacctcctaaactgataccgtagatgatttccgggtctttgctgtagagcgaaagaacggcttggtcgttaccgtcgacaactccgtcagggcctccgacgccgcctgcaccgtggatatctttcaggataatatcgcctttcgaccattcgaatccgccgttatagagcggcagtccagctaaatcttcatccgtacgggcgataccgtcggcgatgtagccagtgatgaagttgatcgggcgtcctgtctttatttcccattcataggcgtttgccgattcgtcgatatacgtgtaatggttgcgggcgaaagagaagttaccggatacataatatgtgaagttaccgatcttattatcgtggcgcaacatgaactcacatccctggtttaccatctctgcgtagttctctttcggtaatgtggctccgaaagtccccggaatcgtacgtttacggtccatcaggatatctgaagttttcttatggaagtaatcaaattcgaggcttagcagtccgttccacaatcccaagtcaaagccgacgtcggctgtcgtggttgtttcccaagtgatgcctttgcttggataaacacccggtagaataccggttgcacctgaaccgaagacggcattggttcctgttgtaaatttacttaaatattggtaataagcaacatcgtctcctccgtcgttccctaatgtaccataggatgcacgtaatttcagattactgataaagttcagtttttcgttctgcttgaagaaattttcttcagtcacgcgccaaccggcagaaacggacgggaaaaatccccaacgcttgcccggaatccattttacggacgagtcgtaacggaagttggcttctaatagatagcggttgtcgaaaccgtagttcacacggccgacgtaaccgatgcgtccaatttccgattcgtgaccatcggcatctttccactggctgtccgcacttccggcgaatagctgttcaagggaagatgaaagcaattgcttacgctgtgcccaaaacatatcaccccattcttcgtattgctcatagaggaacatggcaccgatgtcgtgtttgccgaatgtccgattatagtttaactgcaagtttagcgtataagcgctcgtttcgttgaagtcttttcggacgaagtttccgttttcggttctcgtacgtgtgccgacaaccggggcgtcgtcgcggatgatgtggttatgtccgccgctcgtttcgtgtatatataaggtatactcttttcctacctgtttttcattctcgtaataacggcgatagttgaacatcgcgtttgctgtcaagccttctatccaaggaatttcccatttggcgcttaacttcgtgttcagtgtgttatgttttttggaaacatgcccgttgttgattgcttccagaatattccagttgtagatggttgcgttcggctttccgtttatataggccggctcggtagtcgggaagtttagtagggcacgatacatatcgttcatcaaatctttatcggagtcatgaggccagtaaggtgtgcgttggtcgctcatattaccgtccacatccaatccgatcgtaaagttatccgcaactttggcatctacattcgaacggaaactgtaacgtgtgaagtctaggttgttgaatgttccgctctggctgtaataaccggctgacataaagtaattgatacgttcgctacccccgttgacacttaggttgtgctgtgtcgtaaacgggtttttccaagcgaggtcgaaccagtttgtactgtgtgttttgaagtattcttgttcgtcggctgtgtagtagcgggaatctgtttccgggatgccattatacatgaattggttattcagatatacagtccggtcataagcgttcatcacttccggtgtgcgggttggacggtccgttccgaatagacctgaatagctaaactgaggcttttggtttttaccgcgttttgtcgaaacgacaatcacgccgttagaggcacgagagccgtaaacggcagcggatgctgcgtctttcaatacggaaatgttctcgatcgtgttcggatccaaagcatcgaagtctgctttttcacgaacaacgccgtcgatgacgtaagtcggatttgtattgttgggtgtattgacgccacggatcgtgatcggggaagatacacccggcataccggatttattgtaagagaaaatacccggcatacgtcctgccatcgcattggagatattggaaaccgggattgtcgcaatgttatctgccgaaatagtggcgaccgaaccggtcaggttcattttcttttgcgtaccgtaaccgatcacgaccacttcatccagcttttgtgtatcttccgtcagtgtgacattcaggttgctttgtcctgcaactttcacaaaacaagtattgtaaccgataaacgaaatttgtaaagtcgcgttttcaggaacttcgatcgtgaagtttccgtccatatcagtaatggtcccgacggtcgttccctggattgaaacgtttgctccggcgataggaccaaattggtcggaaacaacacctttaacggttttctgctcttgttggaccttggcaacgatatccatctctttcggacgaaggataatttgtttctcatttaccttgtactcgacattggtggatttgaaaactttctttaggatggattcgattgtctcattgtcgaattttacattgacttttctgtctacatttactaactcattgttataaataaaatggaattcagagttttcctctattttgttcaatacatcttctatcgaaacgttgttcatttctatagaaagacgtgcagattgcgaatatagactatttgcatttgctgcactaagaaagcaggttaaacataaagcggcgattttcatacgcgtaggaatttgaggagacaagtcgaaatatgacctgaaacctttttgttttgatgtaattttcataactttacattatcaaatttaattaggtagttatatgacttaattagacaattatcattcgtcaggtgagattttcggattgataattatttttgatcacgggatgggaagatgttgcaagcatctttccatctttttgattcagatgtgtgtagcagctatgtcttcatggtatttcaatttttgtgttaatcattcatttctgtttattacggctattagacgtaggagataaaaaatcccctacgtcaaaatgcaattttttttatcttgcttcgataataacggtccgacgggtataagaatagtcgctggcctgtttcggttcgatcattgtgcacttgataggagcagtcttttcgagcagttgcaggatctcttcaaaggtttcggtcgtaaaggttgcagaatatttgtaattgaatatttttttgctttgtaagatgatgtttacgttgaaatggcgtgacaggcgttgagctatctctgccatttcggtccggcggaagaccatttttccttccttccatgaagtaaccatatacagattgatgtctgaaaccttagtgttatctgttatcttattatatacggcctgttcacccggattcagaacttgggggattggtttcttttcatttctgatttctatggaaccgtttgccagagtggcttgtatttcgtcatcatcttcataagcattaatattaaattctgtgccataggcacttaccgtaattccgtttgaaagtgctacatcgaagcggtgctttttatctgatgaaaccttgaaataagcttcgccggacagatatactttacgatggtctccgacgaactgtttaggataatgcagcttggaacctgaattcagccatacttcggaaccatccggcagtgtaattttagaaacaaggccataagcgcttgacaattccacctgttcgatcggctgattttccaatctgtagatacgctggtaaaagtagatactgctaattaaggctggaatgagcaatatggctgccgtgtaacgaaaatagcgaccgatcttttgtcggaatcggtttttctgcatggttctcgatacatttttccagtggttgtctacatctattttttcttgcaaatatagcatctggctggtgtcacagataaaacggagatcaccgacctctttccgtaattcaggtgaatccaacatttgtttttcaaaagcaaggctatcttctttcgatagtttgccttccagataggctatgatatgttcggtttgtatattcacgtttgtcatgtatttgtgattagacgcataaaggggagattcccctatgttaaatatatttatcaggagtttgaaataataaaataaggaatggcagatagtctttcagttcgacgcgtaaaattttaagtgctttacttatatgcgcttcgactgttttgactgatatttgttgttcctcggcgatctctgtatatttctttccttcgaaacgattcttttcgaaaatgaggcgagtgttctccggtagtttatccaatgcttcagccaacatcgttctaagttcgacaatcgaatagatatctccacttggttcgtcccccttgcttatcttccattgtttccaggccaactcgagttcctgttttcggagatagtcgatacaattattgcgtacgcttgtgaccaaaaaattgcgggcagatgtttcgattctgatactttttctgttttcccagattttgagaaaagattcctgtacgacgtcttcacatgtttcccaacgttcaatgtaccggtgggcaaagatgcagaggggagaaaagaattggaagaataatgttttaaaggcattctcgtcgtcgtttacagcgatgttccaaaacaacttgtcgattgtatgtggcagtgtctccttcatgttttcgtttgatgacaacaaatatttactaagttctcataggactacgttaattagaccgtctgtatataaaagaatatcaattgattagggaatttaataagagaaacacttctccaaatggaggcaaattcgatttgaatatcatatcgaatttagacctcactattaaaagtttatgataattttattataactttgtacatctaaattgaattagtcctatgagaactatgtgtatcaaagaggcaatgaggtagaaataggtcaaaaaaataaggcgtcccatcacgagaagccttatctttggtatattcaaattcaatagatgtaggctttacctctgtattcttgatgtgtcatacctacatgctgacatatatggtttgtaggtaaaacacctatgttttaaattcagatgtctttccttaattatatattggttcatttgccatcggatgaatcctttccactaatgtccagtatatccttgactatgtaccaaatcacgaataggaccatgatgcttccgatcaggatacctccgactttgatgactgtaccgatgtattcttccatatctattaagtattattgggggtaaatatagaaataaaataatcgattctcgtttttttttcatgaaatatgttggcggagtgtagtagaggagtagacacttatcataattgacaggtattctgtcaattttataacataatatcacggttaactctttatttttgttcttataattcttaaattctcaatattatgatgattccgtttaaggtgaagactttctctttcctgttggcttgtgcctgctcgacggcagggatggcgcaagtaggcaatgactctcctgtaaagcaggtaaaaatatctggttatgtagggactcgaatcacagattgtatcgaacatcgtgtgaaagcgcaggatgtggaccatttggtcgaaccattccgccaccagaacgagaagtcgcgctggcaaagcgagttctgggggaaatggatacagggtgcgatcgcctcctatcgttataaccgggaccccgaactgtaccagatcataaaggatgcggccgaatcgcttatggcaacgcagttgccgaacggttatatcgggaattatgcgccggaataccagttacagcaatgggatgtttgggggcgcaagtatacatcattgggattgatcgcttggtatgacctgtcgggtgataagaaggcattggaagcagcttgcagagttgtcgaccatctaatgacgcaggttgggcccggaaaggtggatatcgtctcaaccggcaattacattggcatgccgagctcgtccgtcctcgaacctgtcatgtatctgtataacagaacgaaagaaaaacgttatctcgattttgccaaatatattgtcggacaatgggagacacccggtggtccgcagctgatcagcaaagctattgccgatgtgcccgtagccaaccgttttccgcatccgaaaacttggttttcgagggaaaacggacaaaaagcatatgaaatgatgtcctgctatgaaggcttgttggaactgtataaggtaacgggcaatccactctatctctctgtcgtggaaaagacggtcgggcatatcgtacgcgaagagatcaacgtggccggatcgggtagtgcattcgaatgctggtatggcgggaaagaacggcagacgcaacctacttaccatacgatggaaacttgcgtgacctttacctggatgcagctctgtaaccgtttgttacagatgacgggtaactccctgtatgctgattatatggaaacggctatctataatgctttgatggcatctttgaaggcggatgcttcgcagatagccaaatacagcccgttggaaggttggcgtcatgaaggggaggagcagtgcggcatgcacatcaactgttgcaatgcgaacggtccgcgtgcctttgccatgattcctcaatttgcctatcaggttcaggacgattgtgtccgggtaaatttttatgctccctcggaagcggagttggtattgccgggcaagaagccggtccggttgaagcaaacgaccgattatccgcggactgatcagatcgagatagaggtcgatcctgcgaaagagacggctttcaccattgccttgcgcatcccggcatggagcaagattgcggtggtttccgtaaatggccaaccccaggatggtgtcctgcagggtgcatatttgccagtgaaccgtaagtggaaaaagggcgaccggatcactgtcaaactcgatttacgtgcccgtctggtggaaaggaatcaggcgcaggccatcgtgcgcggtccgatcgtcttggctcgcgacagccgtttcggggatggctttgtcgatgaggcgtctgttgttgttagtaaagacgggtatgtggcgttgacgcctgtaaaggctcctggttttgcctggttggcctttactgccccgatggtgttgggtacggacttggaaagcaaccgggctccgaaacagattcatttctgcgattttgcttctgccggaaatacctgggacaagacgcagcgttaccgggtgtggctgccgaagacattgaatgtgatgcattcgccttataggccgtataatcagtgaacgggggcatttttacacacttggtaatccgaagaatgagtacggatagtggcacacatagcatcgagaacagtgacctgaggcaggacagtaaataaaaattcgtacctttgtatccctaaaaatacaagatacgtggaagaatatctgaaacaattgaatgaaagtcagcgcgaagcagttgtctatacagacgggccttcgcttgtggtagccggagccggatcgggaaagacacgcgtgctgacctacaagatagcctatcttttaaggcagggactgcctccccaaagcattttggcactgacttttacgaataaggcggcacgcgagatgaaagatcgtatcgcctccctgacagacgaacggatggtacggcggttgtggatggggacgttccattccgttttttcccgtattctccgttccgaggcggagtgcatcggctatccatctaattttaccatttacgatgcgacagattccaaaagtctactccgttccataatgaaggagatgcagctcgacgacaaggtgtatcggccgggaatggtacagggccgtatctcgaatgcaaaaaatgcacttattacctataaggcatacgaacagaacaaggagctggtgcaacatgatatagattctaaagttcctttgctgcgtgaaatatataagcggtatcagaatcgttgccagcaagcgggggcgatggatttcgacgatttgctgttgcaaacgaatatactcttccgcgatcatccggacgtattggagaagtacaggagcttttttcagtttgtgctggtggacgagtatcaggatacgaattttgcccagcatctgattgtacagcgcttgtgcgaagtacaccgacgtatctgcgtggtcggagatgatgcgcaaagtatctattctttccggggagccaatatcgataatatcctgcaattcaagaaccagtatccgggttgccgtattttcaaactggaacgaaattatcgttcgacgcagaatatcgtaaatgcggcgaacagtttgatacataagaatacgaagcagatcccaaaaaccgtttattcagaaaaggaggagggtagcaaggtctccatttgttcgtcctattccgattatgaagagggatatgccgttgctggtaagattaacgatatgaggatgcagaattacgattatgctgattttgccatcctgtatcggacaaatgcacagtcacgcatcttggaagaggccttgcgtaaaaggggaattccttataagatatacggaggcttgtctttctatcagcgtaaggaagtgaaggatgtcatttcgtatcttcgtctgattgtcaacccgcatgatgaagaggctttcaaacgtgtgataaactatccggctcgtgggataggcgatacgactctcaataaattggtcgttgccgctacagatcataatgtcagtttgtggaccgtgttgaacgatccgatcgggtacgctctgccggtcaataacggtacggcaaagaagctaagcgatttccgggagcttatttccggttttatcgaacggaatgttaagctctctgccgaggaaatcgccgctgcggtagtgaaggagagcggcattgtcagtaccttgtttcaggatcgctcggtggaaggaatcagcaagcaggaaaacttgcaggagttgttgaaaggtattgccgagttttgcgagatacgccgcgaggaaggaacggagcatgtctcgcttgctgactttctgtctgaagtctcgctgttgacagatcaggataatgataaggaagagcaggcaaacaaggtgacgatgatgacggtgcacgccgccaaaggcctggagttccggaatgttttcgttgtcgggctggaagaggacctgtttccctccgccatgtcgaaagacaatccgagagcggtggaggaagaacgccgcctcttctacgtcgccattactcgtgcggaagaaaattgtgtattgacacacgccagaagccgttatcgcaatggccagagtacgatgtgttcgcccagtcgtttcttgaaagatatcgatcccaaatatatttatacgtcggcagatgccgttactaccgacggtttattggctactcgtcgttcctcggttttccagcaaccgaaggcaatggaaggagaggcctatgtctctccggtcgctcaggcagtcggacggcaggctcgtctgacacggatggaaacggcttctttgtcttcggccccgtcttcgtcttctgcgccggctctgtcgggtttgcatgtcggggctaaagttcggcacgatcgtttcggagaaggtgaggtaactgccattgaaggagaagggggtaatgcgaaagcaaccgtttcatttgctcatttcggtcaaaaacaattgcttttgaagtttgcacgcttgacaattgttgaataaatcggctagaagttcggatatgtcattcaagtagaatagaaggctctaccgaagctatgaattagcgtttgattcggcagatggaacggttaaactggctgctataagattgttattgaggaaaatagaaacaggctctaaatccgacatttcacatcaaataaaaacggtgcagtcaatggctcaatataaaccattcattatgagtggcttatagaggtttttcgttcattgtggttcaatcctacatcttaaaataaatatattaatatatatataagctcatttccttgtacccctttaaaccggcaaagacacgacaggaacgagaaaaatcccttctttcgcatccggaagtccggtctttcacctcccgaacttcgtggtttgacacgtcaaagtcccttatttcgcacacagaagtcccttgtttcaaggctcacccagatattgcacgatcgtcctcacctgcaggggagtcaacatctttttccctttcctccaaccgttaccctgtagctctgtctttacccccacccattaggacaaccgtttccctgccgatgccggcatcaaatccggaccgtaaaggaccgccaattcctgccacccgtaactcctgacttcgaattcatccatcatcataatttccatcgttttattgtcctgtaaagataagcaataattactgatattcaaaatataatggcatttatattctacctgtttctgcacctatcttcaccgatattcgccgatattccccaaaccgtattccaacctgttgcgaagccctatcttcgtgttgtcatcgataatgagatttgcaggaagttgttgccaattgagcgtttggcaaaattctcttagaaattttgtaccaacacatgggctatccgttccaggccgtcggcaagcaacgtccggggacaggctatattcagacgaatgaacccctctccaccaggaccgtacagtgtaccagaattgaccatcagcttctgttcctcttgcaagcgcagggtcgtggcatccgagccgatactcgatgctcggcaatctatccagaccagataggttccttcgagtggcaacacgggatattgcggtagccgttgctcgaaaaaacggtaaagatattcgtaattctcccacaagtatttccgcaaagcatcgagccatgcactgccttcattgtaagcggctatcgtggcgataacgccgaacggattaacgtcgcacacttcgttgatgttgatggcgcggtcgatacggcggcgtaccccttcatcggcagcgatgatgttggcgatttgcaatccggcaaggttgaatgccttactcggcgaaacgcaggttacggagttttggcggaaacgttcggacagggaggcgaaaggcgtgtagtcatgcccttcatagaccagctcacaatgaatctcgtctgccacgacgaacaccccgttatgcaggcagatgtcaccgatgcgccacagttcctccggcgtccagacccgtccgaccggattgtgaggattgcacaacagcaggattttcgccttcggatcggccgcctttgtttcgaggtcgtcgaagtcaatcgtgtagcggccgtcccgataaacgaggtagttggccgacagttcgcatccattattgcgaatcgacgaatagaaacagttgtatgccggagtctggacgattatcttgtcactcggtgcagccaaagctttgataatagcggacagagctggcacgacaccgttcgtatagataatccaccggggatctatctgccagcgatgtcggtcatcgaaccaccggataaccgcgtcgtagtaggctttgggtactttggtatagccgaaaataccatgcgctatccgcttttgcaaggcttcaacaatagttggtgctgtacggaaatccatatccgccacccacataggcaatacattctcctcttcgggagtatcccatttgtaagaattcgtcccgcgccgcgggatgattatatcgaaatcgtatttcataatttatctttttattcgtaatttataaatccagttactgccctaaagcctgacaagaaaaatcgttccctggaagcaaagctcgatatccaatatatcaaagctcccatgacacccataatcagcatccccgaccagccaactgggaagcatatcactgatggtaataccggtcaccgccagcagggaactgaaaataagcgtggctgtaaccgactggcgcagtatctttctggcttccgcgaaatcctcggctccgatccggtgtgctacctgcacggaaaatcctgttgtggctgctgcttcagcgtcatactcttcccttcgcggataagtgacaacaagtaatcggtctttctcttttctcttcccaaagcctcaattcacaatcggcaggagcctttatattttcatcgaggatgatctccccatagctctcggcggtaatacagcctgtctgcggattcttcactctgcctattgcacctttgatggttgcctgcaccgaactgtactcgaaagcccggtcacaatctgggccgaaggtgcaattctccaacacgaggtcgtgggcatagcagagcggctgttcgccggtaatgtgacagttcaccaaccgaagattgcgcgaatgccagcccagatattcaccgttgagttcggaatcgtagatcgtcacattctccacctcccagaaggcatccttcgtagtgattttggcattgcgcaactccacattcttcacatactggaaaacgtatttgctgtcgctttccaatccgtctatacggatgttgctgctgaacataaacggataagttcctccatgcagtttcagatttttgatgttcagattctggcaacgccagaacacttcatcagcatcgttcatctctacgttctcgatttcgatgtcgtgcatctcgcggaacattttgggggcgtcgatacgtgtatcggtcattttcagatggtcggagtaccatagtgccgaacgtccgcctatatcgaaaaagcaacggtcaataacgaaaccatgcacgtgccagaaagggtagtttccttcgaaccggcaatcaatggcttcgatgttgctgcattccttgatggccgactccccggcacggatgacgacgttctccaatctgagattatgtgattcgaacaaaggtctttctccgccgaattctgtgcttgatattacttccatatattccgttctttaattgttatataaattatgttttgtcggccatgccctaatctcgtttcgcagtgagcagccaccgctgtcatgcgggcttcgctgactgaagtcgagattccgctactgccgcttgtggcggacagagcgattcgtttaccggcgagtttccttattttgttcgagtttgtcatactcttcgtccgtgactggttcgagccattcgttggatgtcttttctcccggaacctcgaaagccagatgtgcaaaccaactgtcggctgccgctccgtgccaatgcttcacgttagccgggatatggatgaccgtaccgggtagaatctctatcgccggcttgccttcttcctgataccaacctcgtccggctacaccgataagcatctgtccacccccttttgtcgctttatggatatgccagttattatggctgcgaggctcaaaagttacgtttgctatcggcacctgttcgctcgaaacgggtgcgaggtaaccgttactaaactgcggtcacgcaggcccaatttattagtgcggctccacacttcgccgaaaagaacatcgtcgttgagttccgcaaatttgggtgcgaactcaccgagttgggtgcgtcctgttgtctgtactattttttcctgtgccataacattgagtgttaaaatgctgaatactgaaattaaaaagatcttgttcatagttgttttattgtatgaaattattgagtttattagccggattgagcggcgtctggtcagacaatattaacgacttgaccatgtgcagcgtctccagcttgtacctctgaaagtgttccgatgcgatatgtttttcataagccgcatgactcgcatacgtttcaagaatcgttatattgcagggattctccttttcaccaatcgcatacattgtcaatacgcccagctcgttacgcagggatatttcgcccacttcggtcgcatagtttatgtacttgtcgagatactgtggataaacctctattttcgaaagccttatgataccatcggccgtcattggctctttggcacacatacctggcagcttatccagattcaaatatttgccgatgctctctcctgtagtacgggaagcatctgttgttgctccgactgtgagcaatgtaaaactcgatgccgtccttaagaaatttctgcgatccatcatcttttgtcttttcattgttttttctgattgcaaatttatcgcggtcgaataagccgacttgtatacgatttacggatatttatacccgaatcctcgattcagtaataacgctgtatgtaattcaattcaaatgaattacttttgctcaaaagaaataaaagaaaagcttatggaagaagttataaaactcaatgaggtagataaatacaacaaactgttcggactcgaaacacggcatccgttagtaagtgtagtcgatttgtcgaaggcgacgcggtggccggaacatttcaaggtcaactacggcgtgtacgctctttatctgaaagatacctactgcgggaatatcacgtatggacgtcagagttacgactatcaggacggtacgatagtcggtttcgcccctggtcaagttgcggaaaccgagatgctgaaaaatatccagccgaatgctcacggcattctgtttcatcccgacctgattcgaggaactgctctcggtcaagaaattaagaactactcattcttctcttatgaaacccgcgaggcgttgcatctttcggaggatgagcgtgagattgtaatggactgcttacataaaatagagacggaattgaagcatagtatcgacaaacacagccgccggttgatttgtgccaatatcggactgttgctcgactattgtatgcgtttctatgaaaggcagttcacgacacgagaacaggtaaacaaagatattatcgtccgttttgaacgactattagacgattatttcgacagcgatggtcccttacgggaggggttgccgaccgtcaagtattttgccgataaggtgtttctgtctgcgaattatttcggagacatgatccgtaaacagacagggcagactgcctcggaatatattcaaaataaactgatcgaacgggctaaagaagccttacttggcacagataaaacaacaagtgaaattgcttacgggctgggattccaatatccgcagcacctgagccggatgttcaaacgggtgacaggttatactcccaatgaatttcgttctcaaaactagtctttatatagtaaactatgaacgaactgcaatttcctgggctttatatcgacgacacagctaaccctcatgcaattctttcgttcttatgtcaatcgggatactattgtctgatattaacggattttcttgctgaattcggaacaaagtgtggtcgggtgtattgcgactactgcgacggaacactcatcagttatcgtccggataccgtctgtgtggaaattcccgcaccttgcctatggatggttgcgtttcaccctgatctgttcaagggaaaaatgcttgaaaagactattgaagaatacacgttcttttcgtatgcactcaaggaagcgttgcatgtatccctaaaagaaaaacggatactctcttcatgtgttgacgatattcgtagggaatttcatcatggtgcagattcctacaaacggactatcttgatacggcatattacccgtctgttggattataccactcgtttttatgaacggcagttcattgtccgtgaattgaacaatgaactgctgatacggcaatacgaaaaacttgtcaaacaatatattggagatggaaaacttgcacagaaaccgcttacttctgcctattgtgccggacaacttcatttgtcggaagcctatttcaatgatctgctcgaattgcaactcggacacacgcacagctgccatcttcaattgaaacgtatcgaaatggcaaaggagaagctacgttcctcaggagaatccctttctcaaatcgttcatgaactcggatttccttcgatacagtatttcagttttcttttcaagaagatgacggggataacgccaaatagttacagatcattaagttaacaatgcttgatttattcagccattcctattcgatactgcccagcttctgttccggatcatgcagatcaaagaatgcagcatttcatgtcctgttaatttattgaattggtcgatggtcgtaagtcctgaattattcatttgtatcattgttctctcttttattcagtttcatgatacaaattacatatcttttcacctgcattgaagacttttaaagacggcgtaagcgagaaaggagaggagatgtataaagtgagggtggacagcgtgaattttcgttgcgcgaagaaacctaaaagaaaacttgtacagcggcaaggatataaggcacattgtgtatatatccttgtcactgcacaagatgagtgatctttatatatcgcagttttctttatgtaaatccttgctcagccgcatggcacagaagttggggccgcacatcgtgcaatattcaccgtccgtcacggcactgtccttgtaatattgaagggcgcgttccggatcgaaagacaggttgaactggtctttccagcggaattcgaagcgggctttgctcagagcattgtcacggacttgtgctccgggatgtccctttgccaggtcggcggcgtgggcggcgatcttataggtgacgacacccgtgcggacatcttccttatccggtaaaccgagatgttctttcggagtgacgtaacagatcattgctgtgccgtgccaggcaatctgggcggctccgatagccgatgtgatatggtcgtaacctggggcgatatctgttgttagcgggcctaacgtgtagaacggggcattatggcaagcatattgctgttctttcatgttctcttggatcttattcatcgggacatggcccggaccttcgatgatgacctgtacaaactggtcccaggcaacctgggttaactcccccatcgtatgtagttcggcaaattgggcggcatcgttcgcatcgtagatggagcccgggcgaagcccgtcgccgatcgaaacggcgatatcgtacattttcaatatctcgcatatttcggcgaaatgtgtatacaagaaattctcttcattatggatttgcatccacttagccatgattgagcctccgcgtgagacgatacctgtcaagcgcgtttgtgtcagttcgatatgctttttaagcaaaccggcatggatggtgaaatagtcgactccctgttcagcttgttcgatcagtgtgtcgcgatagattttccaactcaagtcttctatctttccgttcaccttttccaaagcctggtagatagggactgttcccatcggaaccggacagttacggatgatccattcgcgggtttcatggatattgtctcctgtcgaaagatccatcaaggtgtcgcctccccatttgcagctccatacggccttttcgatctcttcatctataccggacgaaagggcggagttgccgatattggtgttgatcttcactaagaatttccggccgataatcatcggttctgcttcggggtggttgatgtttgctgggatgatggcacgcccggcggcaatttctttgcggacaaattcgggagtgatatatgatttcaatcctaacgcctcgatctgctggttttcgcggatggcgacatattccatttccggagtgatgatgcgccgtttcgcataatacagttgggtgatgtttttccccgctttggcacgatagggtagatgatgttttggaaaacggatgtgatccagtgaggaatcagcgaggcgctgccggccataatcggaagtcagttcttccagacggatcaagtctttgcgtcctgcataccaggattcgcggatacggggaatgccgttttgcgtattgaccgggattttcgggtccgaataaggtccactggtatcatacacgatgacgggattgttttttttgtggaccaactctccgttctcatcgcgtgtgacggtatccagtattttgatctttcgcatacccacatttatcttatgtatcttgccgggtatgtagatcttttccgatgaaggatacgtgatgcgtattctgtttttatttgccatagctgtattattttattctttttatatttcagaatcgtccctgcaagggtccggtttatgtttgttgatctcccggatgaaacggcgtgtctcttcgaccggatcttcagcattgatgatcgctccggaaacggcgatgccttctatacctgtttccatcaatggtgcaatatcttcaaactcgatccctccgatggcaaagataggaatttcaaggccagcttctctgcattgttccatgatttttcgatacccttccaatcccaacaccggactcaggttctttttggtctcggtgtagcggtaggggcccaagcctatgtaagaagctccttcccgatctgctttcaggatatcttcgaacgtgttggctgttgcccccaccaggaaaagatcctctttccctttttcgatgatacggtgccaggcttcggagaccggtatgtcgtttttacctaaatggacacagtgaataccggctttgaaagccatttccagatcgtcgtccagacagcaggcgcaatccgtatcgcagtcaaacagggtaaaatgggcgattgctttggcaacttccaggttcaaattctctttcatgcggagctgtacccaagtacaaccgcctttggtcaccatcttgacctcatccagttctgtgtatttattcgtacggtgtgtgatgaacatcaaccgattagtaccggtaaaacaggcataccttcctctacctgcacttgtatataaaaaatcgtctaattccatgcttgtagctttttatattgtgtgataatagaatcctctttatctgccgaaggggagtctccccaaactgctcccaacacggcagctcccccgaagcagaaagggcgtagaaggggaagggtcgtcaggtctatgcctcctaaggctatgactttatcattgatgatcccggcattggaagcctgtctgagtgtttccggcttgaaaccgttcccataaccttctttggatatgctttgaaaaatcgggctaagaaacagatagtcgagtttcccgaactgttcgagttcctcgatcgaatggcatgaacagctgattgtgcctgtaaaaccgtctggcgactggttgttgcgtctgttcaggtgtatgccgcctaggccatattctattgccaggttgaaacagtcatgaagcacgactttcggatagtagatatccggaatccgatccagcaacttgcgcaattcatttgcttcgctatccggtttacgcaggtgaagatgttgcatcccttcatcaaacagatgtgaaaggatggaatcctctcccttgaaaaaatagggcgaagtaataacgatcagctttttcatacttctatttttatgaggggaaccggatcgaaaaaatgattgagaggtccgtgtccatgtccagtctcaacataggccccggcatgaagggctgccgttatgtaatcttttgccgcacgtacagcgtctggcagttcttttcctaaagccatataggcggcgatggcggacgagagtgtgcaacctgtaccgtgtgtattttgagtctgaatggtcggcacagccagtcggagcggagcttcatcgtgtgtaaacaaaatatcggccatttctttaccttccaagtggccgcctttcatcaatacggcacggcatcccgagaccaacagcttttgtgcggccatttccatttcttcctcgttgcgtatctgcataccggagagaaaggctgcttcgtcaatatttggggtgatcagtgtgacgcggtggaaaagttctttcacgatgacttcgatggtttcatcttctatcagcttgctgccgcttgtcgaaatcataactgggtcgagaatgattttcgacgggcagaaatgatcgattgagcaggcaacgatccgggctgcttcccagttatgcaacatcccgatcttaacggcatcgacggttaagtcttcgaatacggcatgaatttgcccttcgacgatttctggagaaactgcgtgtatgcctcttactccctgtgtgttttgggctgtgatcgatgtgatggcagaggttccgaagactcctaaagccgaaaatgttttcagatccgcttgtattccggcaccaccactactgtctgaaccggcaatagtaagtgccaccggatagcgaaacgtcgtgtttattttcatttctatatacaaaaggagggaaaaagcctaatctgttctttcctacggcggcattacccgcatcaggttcatgagggtataatctcagcccgttaacagtatggcacccctttcgggagacaaaggtaggaagattttttgtaattggaatataatgtgcgtgttttggaacactctgtaaaaagaatctgttatacttttgcagcggtttatttagaaactgttttgattttttacaaacagcttattttgctgttggttttgtctatgctttgagtatcttttggtcatatccgtcccgctccttcgctagatagcccgctatctttctcattagggtgacgaatatgttccaaaaagctatctcgaatcatgaggtaaaaaataaaaacagtttcttgggaataaagtaaaaataaaaggataaaaaatcgtgatggggaagaagattgtttttttgctggcatccttgtttacggtatggatagcaaacggacagaatactattataaagggagttgtaaccgattcaattacaggagaaagattaccttatgtttctcttatatttaaaggaacgacaattggaacagcgactgacggggatggcaacttttcattctccgctttgaccgatgtcaagaatttggaggtatcttatttagggtatgacacgaaagaagtgaaggtcattccgggtaaaacgaataatctgaaaataaaattggctccgaacgggatcacgttgaatgaggtcgtcgtaaagcccaagaaggagaaatacagcaagaaagagaatccagccgttaagtttgtaaagcaagtgattgcttcacgggaaagcaatgatccgcgtaaccacgattatttccaatacgatcaatatgagaagatggtctttgcgatgaatgactatcatcccaaacccaaaaagaacggaaaaccgggcaaattcgattttctgatcgattttgtcgatacgcttgatgtcggtacgactattcttccggtgtcggaaaaggaaaaggtggaatctgtctattaccgtaaagagccgaagtcggaaaagcgtattgtgaaaggaaacaagtcatcaggtgtggatgagatattctcgcgtgatggtatccagcagtttttgaatgaggttttccgggaagtcgatattttcaagaatgatattcctctgtttttacagagatttgtcagtccgctgtctactatcggaccgaattattacaaatattatctgcttgatacgttaaatgtgaacggacagaaatgtgtggatttggggtttgttcctttcaactcggaaacattcggtttcaccggccatctgtttgttacacttgattctacgttctttgtacagaaggcaattctgaatgtccccaaagacatcaatctgaacttcgtttccggaatgacgatcgaacaaacattcgaacgcacgcccgacagtacccggatcattacgaaggacgacatcaacgtcaacttcaaattgagcgagaaatcgaaaggtatgtatgcgcggcgattgaatatctacagcaaccattcttttgatgaacccgatgccgaacgagcgcttgtgtttaaggagagtgcacccgtcattacgctaaaagacgcttatcagcaatcggaggatttttggacaagtaaccgtccggaggaggcaataaagaagaatccgaactcggtcgaaaagctgatggctaaattccgttctgttccgatcttttatataacggagaaagtagtttcagtcctcgtgtccggctatatcccgacgaataaggacccgctgaaaagtaaattcgagttcgggcccatgaacacggcaatcagtggcaatgcaatcgaaggagcccgtttccgtgtgggaggaacaacgacgacggcatttagcaggaacctgttttttgacggatatatggcgtatgggacaaaagatgaaaagctgaaatatgatgctcttgtcgagtattcgttcaatgatcgtaaagaataccgtaaggaatttccgctgaactcgatccgcctggaatatatgtacgatatcaaccagttgggacagcaatacatgtatgccagcaaggataatatgttcttggcctggaaacgccagaaagatacgcgggccacttatctgcggcaagctgaactgacctactaccacgaacattataatggtctggcttatggggctgtcatccgtaaccgtcgcgaatatgcaaccgaatatgcggtgtttgaccggatcggaccggatggagccattagcccggtcaagagctatgatatgacggaactggagttgaaattccgttatgccaaggatgaaaagttctaccagacacgtaaccttcgctatccgattactttcgatgcattgatctttaatttcagccatgtaatggcaaagaaagatttgctgggttcgtcgtatgattatcaccgtacggatatcggtattcagaagcgtttctggttctcggctttcggctatatcgatcttatcacgaaagcggggaaagtatggaacaaggttccatatcctttgttgatcctgccgaatgcaaatctttcgtatacgattcagccggaatcttatacgaatatgaatgcgatggagttcatcagcgacgaatatgcctcctgggatttgacatattacatgaacggaaacttgttgaaccgcctgccgcttgtcaagaagttgaaatggagagaagtattctgtttccgcggcctatggggacatctgaccgacaagaacaatccgatgaatgggggagaggggctgtatcttttccctaacggttcgtacaccttgggcaaagctccttatatggaagccagtatcggcattgaaaacatctttaagttccttcgccttgattacgtatggcgtttgaactatcgcgaccatccgggtatccagacgaaaggggttcggttcatgatgcgaatgtcattctgatattatgttttttcaggcacggatttcacggacaactgttttcttttcgtggtggtttccatgtaatccatgcctaaattatatagaaagttggatttatttctcttcttagaaagcctctgtcatattcatatagacctgcatgcccggctgcccgggttctttccctacgtccagtctgaagttttttcccggttgcatctgaaagcggaggccggctccgaaatttagtttccatttattccagtcaaaaggagtttccccgatcgttccggttccgacccatgccacaaaaccgcattttgcccaaaaattcccgcttttgtatttggccggagagccaaacatatgacggtattcaacgattccgtaagccatcgacttgtcccggtacttgcccatatagtaaccacgaaggtcgaaaggagaaccgaaagtcgggagttccgtaaaaggaatgtcccctaagccgatctggcttttggcaatccaggcaagcgtactgcgtggacgaaatacgtttttaaactgtcggtattcaagctcgatgatctcgtagttataagcgcctccccaatatttaccgaacaatttgaaattagctcctaacaacataccgcgcgtaggtgtcgccacatcatcacgagtgtcatattggataagtccgccgataccgacgttgaagtatttccttttgaactgttggaaatagggatcttcctccatcaccggattaacatccgaaacctttgtgtagttcaagtcaaacaagccgcctaaatagaaatgtgggcggacttcccatacgaatcgggggtacaattgaaaatagcttcgatgaaaccgagtagtggaatcacccctttcgagattctccgccttttcaaatcctttcccgtaatagtgtgaaggctcgttccgataaccataattcatatagatacggaaacggttttcattgaagaaaaacgttccagcgccagctacaacaatggtcccatttatagacaggttcaaaccggcaggcaggaaagaacgttgggaaatagtgtcttgtttattcattcggaagctggcaaggacggcaccacccacaccgaacgaagcttccggtgtatatgaaggaccgcccagtacagaccaccatatgtttttgtgggcccggatggaatctttacgcaattgacgatagtaacgtttcaactgcttttcgttcaattccactccgtctacgatgacagtcttctttcgaggcacggtatctgaaggagtcattatttcttcagaggagagcgcaacgatatcgcgttgttcctgagcctttgctggcaaagaaatcgcaagtaaagaggctcccgcaaatacaacaatatatttaagcattgactaatcctattaatgagggcaaatgtaggaaaaaaatcggatttatttcagaggggcaaacggaaccaaaaggtcagcctttcatcttgctgtagatctacatctattattcccccgaatttgtcggtaatcatggcaatatagcatgggctgtacaaaaaacgattgtttgtgtaaacaaaccatgtgtattaattgttattaatttagagacattgtttaataacagaacctggcaaccttaagaagtcctgactggcaggcacacgaagatgaaaattcagtttgaaattaaggaaaaattgcctgagattattgcagaaataatgcattcagacaagtggcaaacgaaaattcttgaaaaaatgcatggactggagcggataacgatcaaggatccgaactataagtcagaagcttgtatcgaaatttggcaacatgaaatccatatccggacagcatggtccaattatacttatcgtatttttacgcgtggaaatgccgtctggtgtgaatacatcggagcctatcgcggtttactcgaacagaagctcttgccgtctcttacccccaaaatgaatattttggattcggaagtagtggaaagttcattaactgggaataagaggcagaccttgcgtacttatagttcggagaacttgaaattgaagaacttccgtcgcgataatttcaaagaagaatataatgtcacatctccgcaggatcatccgactgttgtatatgacgaatatataaaggaagggatgccaatgccttctccctatggggacagtcagcaaagtaaataactacaaaaagaaagcacttggcttcagaaccaaatgctttctttttgtagttatttgtcactttcgacaatatctgtgtcggtcggtatctaaagttccagcgatgaaattgtcccactgccataagttctggtttatcgacagacaggtatatgtgaaataagatcaatgatgtgttgcaaaacatatcatttttgatctgtttatgcgataaaacgtataaaaaaccttgcttttcggctgaaaagtgttatatcatttggctaaatagggcttttgcctgtatatttgcagccgttaaaaacaagaaagcgatcccttagcgaaggtgaagcccttgtttatttcctgaaaatcaggagtcggagaaaaaggcaattaaaggatgctccgattaagtttaacataaaaatgatgatatgaaagtaagagcttatgttctctttgttgcggttgcattgcttgctgtgtctgccggaactaaaaacgcaaagccgacagtcggcattaaccctggcgactttgctccgagaatagagtctttaggaaccgagagcaatttcagttttcaaaatcattcaggacgttacacattgctgaatttctgggcaacttacgatgctgaatcgcgggctcgtaacgttcaattatggaatgaagtcaacaagttgagttcagacaagattgcaatgtattcgatctctttagacgagaaagaatccatttttactgaaacggtaaaagccgacaaattggaaggtacaaagcaatttcatgaagaacttggcagaaagtcagaattgtttgggaagtataacctgcaaaagggattctgtaacttcctgattgacgacaagggggttattattgctgccaatgtagccccggaagatctgacgaaggtattgaagaagggttaatcagcagattattagcaaaaaaagagttgtccttatcaaaaggggcagctctttttttattatattagtctattttgttgattcttcttagtaagtagtgcggtgcgtatgcactgtttaatggtgcctttgtcatcatatcctcggcaactgttcaccactgagcatatcgacgatcctgtaattgccatacaacgttttcattttaaccagtgcatagcctttttcctgaatacagcccataacagctgtgttctttccttccggataattctgcatgacggcaagagcctgctccgtcttttcttccggtaagatcaccagcaccagtccttcgttggcgatataaagcggatcaagtcctaaaatctctgaagcgccgcgcacggcatcgggaatcgggagcaatgtggacacctttgggaacgacgccgattacgcatccgccatgatcttgttccaacaagggattgcggaaagcaggatagaagatgctgcttatcagttggtgcgtcattcgtccgccgccaccgtgtgccaataacacacagtcggaatcggagaaaggaatgggacaatttgtcgttatcatattctgtatctatttatatctatagtaagcagcacaaaccccttccgaagaaaccatcggtgcaccgatcggatgctcgggtgtgcaaatcgttccaaagaaagggcagtctttcgtttgttttgttcctcgcataatatcaccagcgatgcacggtctcttttccacgctcgacgcaagatcgtcaaagcactttttatacgcctccgtgtctgccgagagaagaaggtatgaggcatccttgtgaaagggattacatttgtcaaaacataaatgaagaagatgaaagaggaggaagttgtcatatcagtcctgaccattcaaggtttggtacaaagtgtcggtttccgtccgtttatctatcggatcgccagtgaaatgaatatctgtggagaagtggacaaccggaataatggggtctgtatccgtacggcccttactcccgtgcaacgggaactcttcatcgaacgcatacgtcgcgaacatccgaaggtggcttccatacataggataaccgtttcggaaaggatagaagttaggaatccatatatgggttttcgtattactcccagtcggtcggaatcggacgaggtgacgcaggttgctcccgatattgccgtctgtcccgaatgcttacgtgaccggaagacacaagcgcagcgcttgcaatacccttttgtcaactgtgcgcattgcggacctcgtttttctatcatccgtgatctgccttatgataggagccgaacaaccatgtcagctttctcgatgtgtccgtcctgccgaaaagaatatataacggtcagcgaccggcgttttcatgctgagcctgttgcctgtaaccattgcggtccgtcttattacgccttatataataaggtaaaggtaacagactattcggaactgctcaacctttcatcccgtttgcttcgtgagggtgaagtgattgccgcgaaagggataggaggctatcacctgatttgtgatgcgaggagtgaaaaggcagtttcccggctacgggatatcaagcagcgggatggtatgccttttgccgtactgtttcgggatatagagaatatccgccgatacgttttctcgaatggggtggaagaaaaggctttgctttcctggcgtcgcccgatcgttctgttgaagcaactccggctgttggcttcgtccgtcaatccgggaatggagacattaggatgtatgcttccttatatgccgctccattccgattggtttgaacggttggatacacccgcattggtgatgacgagtggcaatatcagcgaatgtccgataaccattacccccgaagaggcagaaaagcaattggccggtaaaatacccctcttgctccaccataaccgggtggatgactctgtgttacaggtctgtggcggtcagtcctgcttgatacgtcgttcgcgaggatatgtgccggaaccgttctttgctgacgttccggttgaaggaatcttggctttcagagccgaaaaggtaaatacgtttgctttaggggagggagaaacgattctgcaaagccagtatatcggtgacctaaagaattgggagacctttcgattctataaggaatcacttgaacgttttcaacatctttttcgtttccggccatcccttttggtctgcgatctgcaccctgactatctttccagtgcgggccggttattcgatgccgtttcatctttactgggcgtctgcgatgtctccacgcatcaggcggaagcacctgttaagctggaacaactggcttccgatgaatatcaaagtcgttattctgttttaatagaaaaggagtctatctccatgcgtcccgtattggaaggaatattggaagatctggcagccggagttccggtaacctggttatccgcccgttttcataatacgttggcatggcttttggtagagatggcgaaacagtacaggatgcagaccggaacggacaaagtcgtgatctcaggtggctgttttcagaataaacgtctgacggaacagttgcagcgcatgtttgccgaagctggtatcccgctgttcgtaccgggacatataccctgtaatgacggaggtgtggcggtcgggcaactggcaatagcggcttcccggaagaggcagttatagtatgaatgcaaaacatatatgttttgaaaacgaatcatatatgttttgattgcaaaacacctatgttttaaatgaagtagttatatcgttaaagttatgcatgaattgtcgatcgctcaaagtatcgttcagctatccgaacagcaggctcgcgaacatcattcttcgcagatagaagaagtggagcttgagatagggtgtcttgccggagtatagctgcaaacattggagtttgcgatggaaagtgcagttaaaggcactttgcttgaaaaagcgaagataatccgccgctatgtagacggagaagggcagtgctgcgattgcgaaacggtctttcctatcgggaatttgttttctccctgtcctaattgtggttcttatttgataaatataacaaaagggcgggaacttcggattaaatcaattgttataaaataaaaagacaaacgcttatgtgtggaacttgcggatgcggagagcatcatcatcacgatcaccttcatgaccatgaatactggcacggacatgaacatcaccaccgtcatcacggtgaagggaaagtaataacgctggaacaggatattctccagcgcaataatctgttggctgaacgtaacagaggctattttgaggcgaaatatattttttgtctgaatctgatgagttctccaggttccggcaaaacgacattattggaagaaacgatacgccagttgaattctgatgccactctcgtttgtcctgccatgttcgatttgggagaagcgaagaaagtcgttatcgtcagtaccaccgaaggggatgacaagccgttgaaatatcctcatatcttcttggaggcagatatctgtgtgatcaacaaaatcgatttggcgccttatctggatacggatgtggagacgttgcggaataatgccttgaaagtaaaccaccacttgcaactattcgaagtgtctgcgacaaaaggcacaggaatggatgcctggtgtgattggttggtgaaagagtgtgcaaaatgtaaataatttaccccagatttgatggataaacggagaaatagactatatttgttcccgttcattgaatcaatttaatcaaaatgtcatgattaaccgagaattaattaatcctcagagcatcgtagtggtgggaggatccaataatgtacataaaccgggtggccgtttggtccgcaatctactagacgggaagtataaaggcgaactatatgtcgtaaatgctaaagaagacgatgtgcagggcctgaaatcctatcattcagtgcatgatatcccagagacggaactggcaatcatttctattcccggtccggcctgtccggaagctgtggatgtgcttgccaaacagaaaaacgtaaaggcgttcattgtcatttcggctggtttcggagaggaaacgcatgaaggggcgattctggaagaacagatgctgaaaagtattaacgaagccggtgcttcattgatcggtccgaattgcatcggtctgatgaatatgcattatcatggtgtttttactcagccgattcccgaatttcatgcagacggggtcgattttatttccagttctggcggtacggcacttttcattattgaatcggctctgacaaaaggactccgtttttcttcggtttggtctgtcggtaactccaagcagatcggagtggaagaagtgatcgaatatatggatcgcaactttgacccggtccttgactccaaaataaagatgctctatatcgagcagatcaaaaatccggataagctcttgtatcatgcttcttccctgattcgcaagggttgtcatatcgcagctataaaagcgggtagtacggatgtcggtaagcgtgccgcatcttcccacacaggagcgattgccaactcggactcggcggtggaagccctgtttcgcaaagcgggtattgtgcgttgtttcagccgtgaagaattaacaaccgttgccagtatctttaccttgaaagaagtgaagggtaaaaactgtgcgattatcacgcatgccggaggtccggcagtaatgttggcggatgcactggaaaagggacggctgaacgttcctaagctggacggtccgcttgccgcagaattgaaatccaaactatatccgggagctgctgtcggcaatccgatagatattatcggtacaggtactcccgaacatttggccaccgctatcgatttctgtgagaactgtttcgaagatattgacctgatgatggttatctttggcagtccgggtttggtaaaattatacgatacttatgaagtgcttcataagaaaatggaggagtgcaagaagccgatttttccggtattgccatccatcgtaacagcgggtccggaagtgaaaagtttcgtgaagaaaggtcatgtgaacttttcggatgaagtgacgttgggtacagccctctcgcgtgtgctcaacacgccgaagcccatgagtacggatatacagttgtatggtgttgacgtgcccgaagttcgccgtattatcgaccggttgccgggcagcggttatttgaatcctgaagaagtccgtactttgctgaaagcggcccagataccgttggtagaagagttcacgtcgactgaccgcaacgaactggtcgctttcgccaagagagttaagttcccggttgtagccaaggtagtcggtcctatacataagagcgatatggggggcgttgccttgaatatccgaagtgaggagcatctgatattcgaatatgaacggatgatgcgtctgcctgatgtgacggccgttatggtacaaccgatgttgaaagggcaggagttgttcttaggagctaagtatgaagaccggttcggtcatgtcgtgctttgcggtctgggaggcatttttgtcgaagtgctgaaagacgtctcttatggtctatcacctctgtcgtatgacgaaacttattccatgatccgttccctgcgcggttatcctattataaagggaacacgcggccagcggggagtggatgaacagcagtatgcggatatcatagtccgcctgtccacattgctccgttttgcatccgaaatcaaggaaatggacatcaatcctcttgttgcgactgagcgggggttgtttgccgtagatgcacgtatacgaattgagaagtgattgatcttggataaatttctgatactaaatgtcctgtattccgaaagtcttataaaaaacttttggaatacaggacatttcttttaggctttaaaaattcccgcacgcaaatgtagttatttaccgaatatggatggtaaaaaatagttgtaaaacatctaaaattatttaaccatacatgcgaatgcgatctttaaatagcatatatttgcagcattgcaatctggagatagcaaaactaaaatctaaaattaaatactgtcgaatatggaaagaaaaagagtttacacattcggaaatggaaaagccgaaggtaaagcagatatgagaaatctgctgggtggtaaaggtgctaaccttgccgaaatgaatctgattggtgttccggttcctccgggttttactattaccacagaagtatgttccgaatattatgatttaggaaaagacaaagtggttgaattgttgaaatcagacgttgaaaaggcaatcgccaatattgagacgttgatgaattcaaagtttggagatgttgccaatccgttgttggtatccgttcgttccggtgcacgtgcatctatgccgggtatgatggacacaatcctgaatttaggtttgaacgatgaagtggtggaaggactaagccgtaagacgaacaatcctcggtttgcatgggattcatatcgccgtttcgtacaaatgtacggagacgtcgtgttgggtatgaaaccgaccaacaaggaagatatcgatccatttgaagcaattatcgaagaagtcaaggaagcgaaaggagtgaagcttgacaatgaactggatgtggaggatctgaaagcactggtcgctaaattcaaaatggctgtcaaggctcagactggtaaggatttcccgacttccgcctatgaacaactttggggcgccatttgtgctgtgtttgacagctggatgaacgaacgcgctatcctctatcgtaagatggaagggattcctgccgaatggggcacggctgtcagcgtacaggctatggtgttcggcaatatgggcgatacttccgctaccggtgtatgtttctctcgtgatgccggtaacggagaagacctcttcaatggtgaatacttgatcaacgcacaaggcgaagacgtggtggctggtatccgtacaccgcaacagatcacgaagattggttcgcagcgttgggcggaacgtgctggtatttcagaagaagaccgcgtcgccaaatatccttcaatggaagaagccatgccggaaatctataggcaactggacgaactgcaaacaaagctggaaaaccattatcatgatatgcaggatatggaattcaccgtgcaggaaggaaaactgtggttcctgcaaacccgtaacggaaaacgtaccggtgctgcaatggttaaaatcgcaatcgacttgttgcatcaaggtatgattgacgagaagacagcattgaaacgtatcgaaccgaataaactggatgaactgcttcacccggtattcgacaaggtggccgagaaacaggcgaaagtttgggtgaaaggcttgccggcatctccgggagcggcaacagggcagatcgtgttcttcgccgatgatgcggcaaaatggcatgctgacggaaagaagatcgtaatggtccgtatcgaaacatcccctgaggacctggctggtatggctgttgctgaaggtattctgactgctcgtggtggtatgacttcgcatgctgccgttgttgcacgcggtatgggtaaatgctgcgtatccggtgccggagctttggaaatcgattataagaataagaccgtagaagtcgatggtattaagctgaaagaaggcgactatatttctataaacggtacgaccggtacggtttatgtcggaaaggtagagacgaaggctgccgaactgtccggtgattttgccgaattgatgactttggcagataaatatacgaagttacaggttcgcacgaatgccgatactccgcacgatgctacgatcgcacgcaatttcggtgctgtaggtattggtttgtgccgcacggaacatatgttcttcgaaggtgaaaaaatcaaagccatgcgtgaaatgatcctggcggaagatgcggaagggcgtaagaatgcactggcaaagatcctgccttaccagaaggaggacttcaaaggtattttcaaggcaatggcaggttgtccggtaaccgtgcgtctgctcgatcctcctttgcatgaattcgttcctcatgatctgaaaggtcaggaagaaatggctgaagcaatgggcgtatcggtaaaagagatccagaaacgagttgaatcattatgtgaacataacccgatgttaggacatcggggttgccgtttgggtaatacatatcccgaaatcacagaaatgcagacacgtgccattttgggagccgctcttgaactgaagaaggaaggtattgaagctaaacctgaaatcatggttccgctgacgggtatcttatacgaattcaaggaacaagaaaaagtgatccgtaaagctgccgcacagttgtttgaagaaatgggagacagcatcgacttcaaggtcggtacgatgatcgaaattccgcgtgcggcattgactgccgaccgtattgcttcttctgccgagttcttctcgttcggtacaaacgacttgacacagatgaccttcggttactctcgcgacgatatcgcttccttcctgcctgtttatttggaaaagaagattctgaaagtcgatccgttccaagttctcgatcagaatggagtgggacagttggtgcgtatggctacagaaaagggacgtgctatccgcccggatctgaaatgtggtatctgtggcgaacatggcggtgaaccttcttctgtgaagttctgccacaaagtaggactgaactatgtatcctgttcacccttccgcgttccaattgcacgtatcgcagcggcgcaggctgctatagaagactgatccggttatgaatgttcgatttcataatagtgaaattggagttccatgactatgaaaataaagttccatgcctgtgaaacaaaagtttcatgggtatggaatttttattttatcgtagtatccgatgattttcgagaataatttatgaaaaaaagtaccgaagaaatcacaaaataatgtacatttgttttttgatgatgaacgaataaacaatatctacgtatggagcgatatttaataattaagacgagagatgaattattgcgtatcaaaatagggcagatcctctattttgaagcagatagaaattacactaaactacttttatctaacggaattcaattcacatttgcaatcaacataggaaaaattgaagaaatattggagaaacaagtcgcaggttgtaacacaatcctgatgcgtgtaggtaaaagccatatcattaataaaaatcacatcttgcagataaatttacccaagcagaagctattattgctaacgcaggatggaaaaccgagggagttggtgatatccaaggatcccttgaaggtattgaaagatacgctcgaaaaggaaatgggaaaacctgaagaaccaaaagttgttacagaatgatcatcagaattggaaaagctagcgataatgattttgtagtaaacgaccctcatgtaagccggtatcatgcaaagctgatccgtgaagaggggggatgttggctacttgaagatttgggatcgacaaacggaacatttgtcaatggtgcccagatcgttaagaagcatgttactcccagcgatacgatcaagctgggagataattatgtgttaaacatttccgaagccttgaagtccaacaacgattacagcgaagagtttgctgcgctgaagcaagtttacgataattacattcaagcaaaggttaagatacaatcttctaatcaatttaagaccagattattccagtctcttccatttgctcttcccggtgtagtgggggttgtgatcggtttcctagggaaaggaagtccggaactgttcggattgagtctgtttattacgatctgtgctccgaccgtcggtatctacctgggtgcgaaacagtcggccaagatcccacagttgctgcaagatctgaccaatcaattcaaaatcgattatgtttgccccaaatgcggaacgtttttgggtgaaataccctgggaatcattgcgcaatagaaaacaatgcccgatgccttcttgtaaagctaaatgggtgagcgaataagaatctgtttcatatactaaaagtaatactttcgtacagtaaacccaaacatttgattataaggaactattttgtgcttggatgtcagctcgtttccctacttttgtttccagaaaatttaattataacattttatgcaagaagaggattacacattcgtgactttagacagcgacgatgctatactgaccgacgctgttattgtggatgtggacggggaaaacgacttgtcggatgttgtaatgattgacgaaagtattgatgtttctgattttattacattatccgatgacactattatgttgtccgacgcagatatgctggatacatattcaaccgatattgacggatctgatatatcgttcattttatgatttccgttaaatgtccacattgccatgttgggttaaaggtagacgaggggaaaattcccctcgatatcacctctttcaaatgcccgaagtgcagacaaccgattccagtctctttgctatctatggagaaaggaagtgtcgcatctgaatcggaaacggttctgatacagcctcttcgtatgacgaccggacatctctctgtaattgcaaatgctgatacgccggagcaaactttccctcttcaggaaggtgtctatatcatcggacgaaaatccaaggcatctactgctacgatcggtattgtgacggctgataaatcaatgagccgagaacatatccggatcgaggtaaaaaaagatgccaaaggaggctataaacattatctttctgacaataatagtaaaaatcatacgttatataatagcaattacttagagaatggagagattgtcgtactcaataataatgatgaaattattattggtcgcacagttctccgatttaatgaataaaaatagtctatgctatgaatataacgatcggcaacccctgggcagtcagtgaaaaaggaggcagattgaataatgaagattctatctttcctttgccggaaacggcaaattccaatcaaaacttatttttggtatgtgatggtgtcgggggggctgaaaaaggggagattgcaagttcattggcttgcgagtctttccagacttttttctcaacttttcgtgaaggtgagccgaacgcagattttataaataaagcgattcgttataccgaagcacgttttgatgactatgtagcaattcatccggaagccaaaggaatggcaaccaccttgaccatgacctttgtaggtacgaccggcataaccttggcgcatgtgggggacagtcggatttaccatttccggaaaggagaaatcttgttccagactgaagatcattcattggttaattcgttagtgaaattaggaaaaatcacccatgaagaggttgcacatcacccacagcggaatgtgatcatacgggctatccaagggacggaccgtccgacagaggctgatgtcgtacttttggatgatatcaaggctggtgattttttgttcatgtgttcggatggtgtactcgaacgtcttaacaatgatgagctttcggatatattcaagcatttaggtggtccggaagagattaaaaacgcaatcatgtccgcttgtagcgggaaaacacacgataacttttctttttatatcatacctatacaaaatgtgttagattccgcaggaattaaacaaaatattctttcattcctttattcttttatataaataacgtaattttggcagactaatagaattgcgcatagtatagttatgaatttgccaaacggacatgttcttcagaatggaaaatatcggatcactcatgtaatcggtcagggcggctttggtataacatacaaaggcgtctggtatacggaggtgaagggatcgttaggaaccgtacagacagaggtgcctatttgcataaaagaatacttctttaaagactattgttacagggaagcagaatcatttgctgtcaaggtgcattccgagacaggaagggttcttttcgataaattcaaagagaaacttatcaaggaagccaaaattctttctgaagttcaccatcctcatatagtgaatgtgctggaagttttcgaagaaaacggcacggcttatattgccatggaatatattcccggttgttcactcaaatatatgatggacagggaaggcatattgccggaaccgaaagtcctcagatatgttcgccagataggagaagcactccagtttgtacatgaaaagaacattcttcacttggatatcaaacccagcaatatcctgattgactcgtcagggaaagcacgtctgattgatttcggtgtgagcaagcgatatgacatcgagcaacaggaaacaagtacgaccatgcttaccttatcaaaaggatttgcctcgatcgaacaatacgataatgaaggaacacaaagtttttcaccctgtccggatatctattcgctcggtgctaccatgtataaccttttgacagggaagattccgaccgaatctattttgcgggcaacacgtcctttgcagaatccgtcggaactgaacaggaatatatctcctaagacagaagccgctataatcaaggcaatgcaaatcattccggccgatcgtttccaaacggtggatgaaatgatggctgcattagattttcctgcggaagaagaaatacctgcaaatgagttgcaaaatacagacgggcaggaggcggatggtgagacaacggtcatacatccgaatgagcaatcgcctctgaatgaggaggacgaagatcgtacgattataaatagcgaagaaattatttctcagccctctaagaaaaaaagaaaagggatgctgatatccgtgcttattgctatatttgccagtgcaggatctgttgtcgcttttctggtgctggggaacaaaacctctacgaaaccggatgtaacggagttgattagcccggtcgaagaggaaaaagattcaataggcatccttcaagacacaactgtttcggaggtgaaagaagcatctatgcttagcgagaaggataagaaaacagaggcagcaatggcgcgacagccggaaaaggtgacgcccgttgttgttgatgaaccccggaagcaaccggatacaaagcaggttccggctgaaggaaataaaataacaatacagccagtacagcctactgctgaagaaattgaggcggaatatgtcgctttaatagcttctggcaaggagaagatgggaaaagcggactttacgaacgcaaagaaagatttcacgaaagcgaaagaaaccaagttgacggaagaggtcgtacgccttttgatttcttgtgatgaaaaggaagcagccaaacttttggccgacaggaaagctcaatatgagatgaagaaaactttcgggaactttacaattgtacgaaagaaatcgaccatgttatacggggcgatcgattcggatgcgaatgagcgcataccctgtaaataccgtaatgtcgggattgccgaaaatggccgtgctttcgaacgtaaagatggtttgttcgatatctataatgctgatggcgtgttggtaaatgaaggatcaacgtattattaacgtgtttatgaaaagactttggattttaactctttttgttgcgttgccgatgtgtttgctggctcaacaaaaaacagaatataacagaaaaggtgacgaggcgatgaaacgcttggactatagcgatgcaaggatgtggtatgaagaaggtgtcgtgcaatgtgatccttacagtatcgagcagctcacatcgatttggttagccaaccagagaatgcgtccatcaatgcacagtctgatgaacaagtgtcgggcttgtctggaactgatggccaataatgaggatacaacagccatttcgcagctgataatctattataccgaggggataggaacttccaaaaacgaaactttggcccaatcctggcaagatcgtctggaaacacttcgcaaaccggtagagcccgttttctatccttctgccaacccaataaagccagatacccccaaagaaccgatgaagttctttattggttatgcctactccatagaagcaccttatggcttgacagtgggaggggtgaaatctcgtttgggttggttcctgcgttttaagaccaatctaggttttaaggagtacgacggggaatgccggggaacagatgagtttgtcggtcctactcccgataatccgttttatttcacgaataagaaaaaggtgaataactatgccggtacagctggtttggttgtaaaatgtacatcctggttatatacgtccgtaggtttaggatatggcagtcgggaattattatgcgaatatatcacaatcgataattcggattatagaatagaaaaatcctattgggcgaagaatttggattattcttatagcgggttagctgccgatctggatgtaatggttaagttcggtcctgcgtttgtaagtgcagggtgcaatacgttgaattttaaatatgttgatttgaatgccggtgtcggtctgtttttctaataagaattatttatgaaacacatatactcaatctttttatcagctgtttcacttttatggatgctttccggatgtgtggaagatccggatatggatacgcgtttgcagaaagcaaaggctccggaggtttccgagacttcaatggaaggagaagcatatgcttcttcgatcactttaaaggctcaaataatgaaagagaacggtttgccagtaaaagaatgtggggtttgttggagtacccaaacaggaacggagccgcttgaaaacatgcgtaacaagcgatatacaaaagctgataaaatagaaaaccacaattttacagctaccatatccaatttggaagatagtacaaaatattatgtatatgcttatgctattaatgatatagatactgcattttcaaaaacagaaggagcgtatacgacaataaatggtattggagaagttgcgactttggatgtggatagtgccacagtaaaagcaacttccacttgggtgaaagggaaagttaagaatcggggagtcggcattgagaaattaggtttctactataagaaaaagaaacaaaccggagatatcgaaccctcggatcaagattccgttatcacatacgaagggagtgacttggcaactgtcgatactttctcctgccagattacgaatctggagccggaaacttggtattatgtccgtgcttttgccaaaaatcagtttggtgagtttgcttttaatgtggactcttttaggactacagatggcaaaccttttgtcggtaagttgagtctgataaaagacagtacgactttcaccacagccgatctgtctgctttcttgatcaatgagggagatgcacctgtcagtgcctatggtttctgctggagtgtagaagaagggccgacgatagatgctgatacaatcatttgtacgagccttgaggatgatggtaaatttacgggaaggatacagggattggagtctgccaaaaaatattatgcaagggcttatgccataaataacttcggcacagtatatagtgaagaagaaattacgatttcgacaaaaagcgagaagccgaatattataacattccccatcacccctgattcgatcaaaagcgatggaacagttcacattggcggggagttgcagaatggcggaaacagtgctgccacagagtgggggatttgttggtcttcaaccaataaggaaccgagtatcaaagataatcatgttgctgtagatgatacgcttttcatgtatgcattgccttcgttaaaaggtgctacagtctattatgcaaggacttatgctactaacaaaagtggtttgacaggctatggagaagttaaatcttttactactccggatatttttgagaataaaaatatttatccgggagctaataggcaattttctgctgggtttatcttagataatcgtatctatgttgtagggggagatttaggtggcgaacgcagtaatgaaatgtttgaatataatgtagatgggaataaatggatttctatggctgaatgtttgaatgcctactctcaaatgagtgctgcagtttataagaatcaagcatatctccttggaggcatagacaaacagacaataggggctaattgccaaatatacaacttagataacaattggtcagaacctactcaatattcactaccgcgaggtcgtttcggtgctgtcagctttacttatcgggactctttatatgtattgggaggatcggatggaagcaataatatgaatgagatattgcgttacgacctgtcttcacagaatatagatggaagttgggatgtaatcgctaaattccctgcttatcaacgtggtggtattgttcaggttgtaggaaataaggtttatgccggattgggagaaggcggaaatggcataagaagtggtttttgggaatcttccgatagtttgaagatatggaatccgatatctattcctgataaaataggaagtgtctcatctggcgtttatgatgaacagagaaacagcttttttatgattgataataacgggaagatatgggaatataatctgtcaagtggtgaatggacagctcgttctttattgggttatcgcatgaacaattaccatatgtttatgttaaatggtataatctatattttaggacaggatctatattatgccaacaaatttatcaagtataatccgatatgggataattaatcatgaacagaacaaagatattagaagagattcaaaaaaacgtagaactcttgtcgactactggtttagaggcgtataaatatattccgctacaccagaaaccttccccgtcggtgacggcactcagggagatcatgaccttgctccgaaaggttatttttcccggtttcttcggaacggaacaggaggcacagacggattccatacaatattatacgggtgtatatctggagcaggcctacgacctgttgcaggaacaaatctataatggcctgtgctttgaagtcgaacgttgttgtgattccaaagatcgtgcttctgaaatagccattgcttttatcaataaggttccacatatcaagtatcttctatcgacagacgtgaaagctatcttggatggtgatccggcagccaaaagccccagtgagattattttctgttatccggcaattcatgccattctttatcagcgcgtagcacatgagttactgaagctcggtgtgcctgtgattccacgtattataacggaaatggcccattcggatacaggaatagacattcatccgggagcgcaaatcggagaatatttcagtatcgatcatggtacgggggttgtgatcgggcagacggctataatcggtaatcatgtccgcctttatcaaggtgtgacattgggtgcaaaaagctttaccttggacgaagaaggattgcctttggacgtaccgcgccatccgattatcgaagattatgttacaatctattccaatgcctccattttagggaggatcactattggtcacggctccgtgattggtggtaacatctggcttacccatagcgttccacctaattccaaagtattgcagacacgtgctgtcgaagataaatagcagagggcggcatattgttttcactttcatttcaaaacccatagctttaggctccataacccatagcattagataccctaaagctatgctttattaatcccctaacgatttttgcacaatagccttgggattaaagagaaaagataggctttattccggaaaaatatgtatgtttgcagatataccttatttgagcgaattataccttaaaatagtgtagaccatgaataaagtgaaaacattggatgatcttcggaagatgcgtgaaaccttgcgctcgaccttggatattagagaaaaaagtaatcatcctgaacaaatggtacagatccggatatctatggcaacttgcgggatcgctgccggagccaaagagatcatgaattatttcattgaagcactggatcgtgaaaaagtagatgcattggtgacacaaaccggatgcatggggtattgctatgccgaaccgactgtcgaggttaccctgccaggtaaagaacctcttgttttcggacatgtgaagaaagcgaaggtggatgaaatcattgaccggtatatccggaatggggaactgctggacgatattatcccggtcacttacacggttgttaaaccggaataacaaaacttccttaaacacttaatacttacataatggcacagtacaatagttatatactggtgtgtggcggtaccggctgtcgtgcatcacagagtgaacttatacttcaaaatctgaaagaggccgtcgaacgacataagttgcaggatattgtccaagtgatccgtaccggttgcttcggtttttgtgaaaaagggccgatagttaaaatggttccggacaatacgttctatgttcaggtaaaaccgacggatgccgaagacattgtccgggagcatttagtgaagggacgtaaggtagaacggcttctatatgtcaatcccgaaactaacgagcaagtaccggattccaagcatatcaatttttacaagaagcaactccgcattgctctcaggaattgtggttttatcaatcccgaaaatatagacgaatatatcgcccgagatggttatgtagctttaggtagagccttgaccgagatgacgcccgaatcggtgatcaaagagatcatggacagtggtttgcgtggcaggggaggaggcggtttcccgactggcttgaaatggcagataacccgtaaagtgaaagctccccagaaatatgtcgtctgtaatgcggatgaaggcgatccgggagcattcatggatcgttccatcctggaaggtgacccgcattccatcgttgaagcgatggcgatcaacggatattgtacgggagccacgaaagggctggtttatatccgggccgaatatccattggccgtagagaggttgaagattgcaatccggcaagccaaagaatatggtctactgggtgaaaacatcttcgggacggatttctctttcgatatcgagatacgctatggggcaggagcattcgtttgtggtgaagaaacggcgttgattcatagtatggaagggcttcgcggagaagcgactgttaaaccgcctttcccaagcgaacagggttacaaaggttgcccgaccaatgtgaataatgtggaaacatatgccaacgtgccggttatcctgttgaagggagctgaatggttcagtagtataggtacggagaaaagtaaggggacgaaagtctttgcccttgcgggaaaagtaaacaacgtcgggctgatagaggttccgatggggacgacgttacgcgaagtgatcttcggtataggaggaggcatcaaagatggaaagaaatttaaggctgtgcagacaggtggtccttcaggtggctgcctgactgagaagcatctggatttgccgatcgactatgacaatcttttggctgccggttcgatgatggggtcgggggggatgattgtgatggacgaagacgattgtatggtcgctatggccaaattctatctggatttcacggtcgaggagtcatgtggcaaatgtgctccttgccggattggcaacaaacggttgcacgagatgctgcaaaagattacgtccggcaacggaacgatcgaggatctggaacggcttcgtaacttggctggtgtgatcaaagacactgccttgtgcggtttgggacagacatcgcccaatccagttttgtctacgatggataacttctatgatgaatatctggcccacgtgaaggaaaaacgttgtccgtctcatcaatgtcgcgaactgacgcaatattttatcaatccagagaaatgcaagggatgtacgctttgtgcccggatgtgtccggtaaatgcgatcacgggagacaagaaagttccgcatgtgattgatccgcagacttgtatccggtgcggttcatgtatagagagatgtaagttcggtgctatttatgtgcactaaagtagtgaagaatggacaatgacaattaaatgtatggaaacagtaaagcttattatagatagaaaaccagtggaagtccccaaaggaaccacgatcctggatgctgcaaaaggaatgggtatccgcattccgactctttgctatatgaagttggaagatttgcactatgaaaataatccgggtgcttgccgtatctgcgtagttgaaatagaaggtcgccgtaatttggctccttcctgtaaaacggagtgtatggaagggatggttgtgcaaacacacagcccacgcgtgatgaatgcccggaaaaccgtaatggaactgatcctgtccaaccatccggcagaatgtctgacttgcagtagcaatggacattgtgaactacaagcaattgctcacgacctggggatacgtgagattcgctataaaggcgagatgtccacattccagatagaccgttcaccgtctatcgtccgcaacatgaacaagtgcatcatgtgccgccgttgcgagaccatgtgtaataatatccagaccgttggggctttgactgctgtcaatcgaggctttaatgcagccgtctctacggctttcgaacgggatattgccggtagtacgtgttcctattgcggccagtgcgtatcggtctgcccagtaaacgcgttgagcggacggaatacacaacagccggtgttggatgcgctggccgatccggacaaaatcgtgatagcccagacagctccggctgtccgtacggctttgggacgcgatttcggatatgaaccggggacattggtaacgggtaaaatggtttccgccctccgcaggttgggcttcgattatgttttcgatacggattttgccgccgacctgactattatggaagaagggacagaactgttgcaacggatcgggaaatacttgaaaggcgatcaggaagtaaaaatgccgttgatgacgagttgctgtccggggtgggtcagcttcgtcgaacagcatttcccggaattattagacaacctgtcgacagctaagagcccacagcagatgttcggtgcaattgccaaaagttattttgccgaaaaattgggagtagaccgaaagcggatcgttgtcgtgtcgatcatgccctgcctggcaaagaaatatgaagccagtcgtccggaatttgcggtcgatggcaatccggatgtcgatatttcgatctatacgcgcgaattggcccgcctgatccgctatgcaaacataaacttcgcggaactgccagatagcgatttcgatcgtccgttaggcgaatcgacaggagccggagttatcttcggaacaactggtggcgtgatagaagctgcttgccgtacggcgtacgagctatatacgaaaaaaactcttcctaaaattgattttgaagaactccgcgggctggaaggcattcgcagtgcaacaatagacttcgatgggacaccgataaaaataggaattgcacatggtttgggcaatgcccgtagattggttgaagaagtcaaaaacggcatgtcgccctatcatgccatcgaagttatggcatgtccgggcggttgtatcggtggtggcggccaaccgttccacagaggcaggatggaggtgctgcgcaaacgtgcggcggctctctatcaggaggatcgcagcaagacacttcgcaagagtcatgagaatccttatattcaagctctttatgccgactatctgggagaaccgtgcggaccgcgtgcccacaagctgttgcatacgcactacttcgaccgtaaggaagccattaacatgtttacgcaagaaaatcaggagggataaacgatggataagatgaagatacatttgattcagatgaagatcgatgaattgttggctgtctgtgatgaacataataacgatccgggagagctgatcaacatattgcatgccgcccaaggcatattcggttatctgcctcgcgaagtgcaagagatcatcgccggccggttgcatattccggtttccaaagtatatggagttgtgacgttctattcgttctttaccatgactccgaaggggaaatatcctatttccgtctgtctgggaacggcctgttatgtacgtggagccgagaaagtcttggaagagttccagcgccagttggagatcaaagttggagagactacatccgacggcctgttttcattggattgtctacgttgtgtgggggcttgcggactggctccggtcgtcacgattgccggaaaagtttatggacgtctgacaccagagaaagtgcgggatatcctttccgaatactacctgttggagcaagtataagcgactcgtctgttgtgccacagcattggcacaacagacgagtcgcattggcacaattgtgtcgtaacgatggcacggccatataataaaggcgatcttctattctttggtttctatataaacgacatgcgtctgtaaatattcttcaagaccgtgtttcccatctgcaccgccgattccagacttacgccatccggcatggaaaccttgcatagcttcaaagttctcacgattgatatatgtttcgccaaatttcagcgagcgcatgatcttgaatgcatagtccagattttgggtatagacggaagatgtcagtccatactcacagtcatttgcccatgcaatcgcatcatcgatatctgtatattcgacaatgggcaggatagggccgaaggtctcttcccgtatgatatccatttcttgtgtggcacaatccagcactgtaggttcgaagaaatatccttttgttccgatccgatgaccgccacatagaagtttggctccctgccgaaccgccttttcaactttttgctccatggcagccaaagcatttgcttcgatcagtggccccatatccaagtctgcgatctcgttcggattgccgactttcacctgcttcataccggccacaagcttttccataaagatatctttgatctttttatctacataaacccgctccgcacaattacatacctgtccggtattgataacgcgtgaagcgatgatcgacttcaccgccaagtctatatctgcgtcttccatcacgattgcaggagcttttcctcctaattccaaagatacttttgttatattaggagctgctgctgccattgtctgttgtccggcacttacacttcccgtaaggctgaccatgccaactttcggatttgctgccaactcatgacctatcaccgagccacgtccgttcactaagttgaaaactccggctggcaaaccgacttcttctacaatttgtgcaaaaacgtatgcattttcaggtgtcagctgactcggttttaccacgatcgtattaccggtaatcaaagccggggctgctttgcgtgcaaccaggaagaaggggaagttccagggaagaataccggttgttacaccaattgctttcttgaacaggaatatgctttcacgcggacggtcgctggggatgatttcaccttcataccggcgggcccatccagccatataatcgatataatctgccgtaaaaagaacttccacattagccaggccttgcgtctttcctccttcacgaacaattatatcagtcagttccttttctcttttacggataccggctgcaattttggtcagataagcggccctttctatagaaggtgtcctttcccattgaccctgagctttttctgctgcatcgatcgctcttttagcatcttcgaccgtaccgtccggcattaatgatataacttcttcagtagaaggatttaataccttaatccattttccagattcatgttctatgaatctgccatcaataaacattttcaattccttcatggtaatatctttttaggttgaattttgattttaaaagtacaagaaagaaaaaatgatcatgtttaaaaaatgatattacttattacagaaatgatatatttctgtaatacaggattataatgtatggctaagctgatcggaagatagtttttttcattatttctgaaccaaactgaattatgtgctgttatatgataaaatgaattaggaattatatccaaagaaattcctaagacgattaagttagtagtatttgttttttcatataagtagagtttgttatttgtttggtccgtatgtaactgtgaagttggatacgggctttttttgtgtttcttaatatgtttactttaaataatcacgattaggttgcgtagactagatttagtagatgatcccgaagaaccaggtaaccgtaaagactgccagcacaatcaggtatatccttacgatacgttcactttaccgaaattactgcacacggaatccttctaaaatttaaacatacagatttaccataaggaaacgaagacagggcaaccgcatcaaaattttccaaggttgcgatcttcatacggagttttctacaaatcttctatcactctatcactacgaaggttgtagctattaatattcaagagttagagacagtgatacaggacgtttccctctatcactcctctatcacttctgaaacattgcattttatcatattattgaaaaacagcacattgttttcatatgctttttcaaaagcatatgaaataatcgaataaacaaatgtaaaaatgaatataataggtattaaattggagaaatacggttcttcatttcacaaaagtcctctctttttttagcagaaacaagcacataattccgtaaacacccccatgttgccttccttaacatccgggtgtagagagtcggtacatccgggtgtaagagggggcaacatggggatgtccagcaactaaagtgccttgccgagcaatgaaaaccacccggttttaccgattttacagtcgtttttgcataaaataatcgagtgatttgttgcgtattttgtcatggttgcaatatttatacttgaaacgtaagctgaatgtcctgtttccataccttatcttataacagggaatattcatttttcaagcaggatgatcataccacttctccccataatttcgcattgttccaagttgttcagccggctaccccattgtatgtcccttatttccggcaatgaaatcgtagctgggtggaaacctaatgctttctcatcgatggatatttttgccttttgtggtagatccgtccaattggctatcacgagaagagctttattttcattcgtataaacggttgcaaggagatttgcattgtccgttttaacagggttgttttcatcccaatagccatgcatggttgctttatccattccaaacgaatcccacaattgccagagtgggacaggattaccgctccagggtaaacggggaagcattccaaataccataccccgaaaaggattgcgtgcgtccagtgtctcgcttaacaagccaaacggaataccagacatttccaccaaccagaagtctaccgagttgtcagctttgaaaccttcgccaatccaagtgcgatcgatataagggagaagctctgtataaagatgcagggagttggcataaccagcccactggttcatgtggttccaagagtgaatgtcgatcaggcgtcgcttgccgtctgcatcgaggatgcgtcgagcacgttgcagcgttttacggtcaagagcgctatcgtcaatataaatgccgtcgacttccaagtttttcaccatccaatccagtccggccagataatagttgttccaacgggaatcgggagttgttataacggagatgtccatatcgcctgcatattttccctcttcgaaagcgttataccaagcagggataaaatgcgtggcaaggttcttgttcaaccactcgttcggtccgttacgatgaattaatgtacgcgtatcctttccgggaccgtcatggatcacttctccgcccaaactacgcaaagcccatagttcggggattttcacggtcagttcccgtgtcgtgtaatataaacggacaccgagattcttactatgagcttcagagatgaaacgtttcagatcggcgactgattcgtcataatacggatagttgataaaaggataaatatctttcttatgatggacattgatcaagtttgctccggctttcaaagctgccggaatataaccagcacttacgtcgctgttcgagtggtagaaacgttctgttgcctgcaatttcaagtcaatcggtttaacaggggtgatttgcatatcgaaattgtagtgcaggatttcgtttttgcgtgaacagcgttcgccactgtaaacgatcattcgtgtttcaccatcttcttccggctggatgcggataccacctttgttgttgtttccccaggaaacaggcaggttcagtttaccaagtgcgtaatagatattgactaacggacgcacaaaattctcatccatgaaatgaaggttaaggccggcgttgacatttcccatccagattttgtcctgttgtttatcggtgtcccatttccatgatatcagtgtgtctggacgaaatccgcctttgtgccccaatcccatcatatatttggatgcataagtcgtgtaagggacttccaaacgtatatctttgatttcgatatcttgtttcggtttgacttgaagacggatattactaataccgtcgaacccgaaagttccctgacatactacattgaagttttggctctttagtatcgtttcccaactaatggaagcgttattacggttagtgatacggagacttcctggcttcaaggcttcctgtccattgaaagtttcgataataaatgccatttcctttgccagtacggcatttgagatagaatcactgagtctgttattggcatcataacaagtggttatcctgcaaggtagcccgctcgaagaaagttcaatttcgccgcccaaccaggaaagagttttcttccggatagttacaggtgtataaggtgcagtcggttcatcggcatttcccagtgtggagttgagccagcgcaaacgggttttccgccaaccttcgttatctccatgattggcgatcggtgagccggacacgtttagctcaattgctatttcgacaggttgggagcttccttccttcacaaaagcttttcctttatatatccctttggctgatgcagggatgtccatcccgatccagagtgcctgtacatatcctttagggatacagacggttttccggaatgtttgtccgtcggtatcggtgccttcctggttgaaacattggaatgaggtggattttattttatttccatcggcatttaccaagtcggagaatgaaacggagacacctttcaactccttgaaaggtgtgaaaacaccgatttgccacgtatagaattcaccaggttgacagtctcctttcaattgtagccaagtgtcgaaaacgcgttccgtccaacgggccggaatgatttgatcaagacggatatcatgcatccgatcttcagcaaaacaaaaatagcctgctgccggtttctgtgtcagcaatttttgtagagccgtatccgaggtagcctgtcgcatttcggagtcctgttcattaacagttccggtacgcttcaagtcgtcgaaagcattcgtgattgtctcctgagctttcaagtcaacattactccaggcaaggagcaatacaacgactgttaggaatgttttcttcatatttgtttgttttttattctattatataccaattatagccttttgccggaatccttattctcaatagaatcgtataatcgcgcgacaaagtatggagaaccccttctttgccttgctcttttacaaccgcctccgtggtcaatcctgtatagtagagaggtagtttgacggtacgctccatcggctcgtcggtagggttatagaccatgacaaaacctttctcttttttaccgggagcgacatgcatgattccgtcccaatctttaccgtcaggacggcgtaagtggatcacttcgctgtttagaatataacgatatcgtttataccagtcgatgatttcttttaccgtctgttttgtctcctcggtatcataaagccgatgtccccggtaacaagcctgtacaccggttccatagttttgcatcatgtgtgcccgatagtcggcaagatgttcgctgagcggttccaatgtagcggctgctccaccgccatgatactgggtgagaggcacaaaagtccaacacatactcggaagccgttcccaaagaccgtcatacatgacttgtctgcccagaaccaactgccgttcacgcggtaaagaccagttgacttcacgataaccgattccgactttattgcctccgttcagcagatagccataatccgggatattcatatagataccattttcacacatccatcggtataggttctcaatttgtttacgttgtttccattgggaatctttcagcccttcatggtgagcgtgaacggttgaagcacaaacattccccggataggaaccgtcgttttcaaacacggtcatacctgtcttttcgaaaaactgtttgatctttcggaaatagtcatagccccaatcactgcaaagacagggagaactaccgaaaatcattccgcctctcttacctgtttcgggatttatcacatccacatcatcgctgatccaacgactcgatagcagcgaatatccccccaactcgataccgcgggagtcggcatagtcgcgcaattccttaaacttggcatagttggtcggtgattcgtcttccatgttaaggccagagccaaagctaatgatcagcatttcgtagccggtatcagcacattgatctattgcctgctttacgatcttaggatcactggatgtacaatgcatgaagatcgggttttcggttgtccagggagcaatcgtccggtacatccgtttgacaaatagcccttttcggtctctgtcttcgctatcgaaaggcatcagccaagtatggaaactggaaaaagaaccgccattgcagattcgctcgtccggtcccattggcagtttgacctctaacaggcaaggagtcagcagtggataattacactgcgaagtgtagcgcggatcgggattccagtgctcggtcttgtcggcaatcttttcgatgaaacccagaaaaccccaatcgctttcgacatggatattgggtttgcggaacatttccggactcttggcttccaccggagactctggctcggccatagctaactgttctaggacgaaagaatcgagattgatatccgcacctgtccggttttcaatctcaaaccatttggaaatacaaggcagaccgtcataaagggcgtaatgtagtttgacttttacgcctttcagttcgtccggcccttctaatagaaaggtcagctgtttgccggatgggttccgttttttttccaatgcccatcgtctacttttccagttaatacgcggggtgatttctgaaatccgaaaatcgatgacacggaacgaattggcaaaaggctccatccggtcgagccatttgtactgggtgtaaccaaattcgggttgaccgtccaagccacccagcgaatagtttttgccatcaagcgtcaaaatcccttcattgctcacggcacgcagcatattctctccggtcatcagattttggatatcgactgtcgccagatttggaaaaatgcggaatacgcgactgactagtccattgctcaatacgatatcttttccttggtttgcctgataaacctttgctttggcttcctggttacagatcagccaatcgtaactaggtgacggcaagggcaggcagactgtttcgagttgtccgattttctgttgaagggatcgttccacttctttagacatggaggcaatctctccttggtattcgggagcgaccagagacggtcgaattttgaaataggtaatgacggcctccaaccaatcagcatgatcaccgctaagtccatcatttgcactttctgcttccagttccaggatcttgattccttcgacgggaagagagattgctctggctgtctcgcctccacgcatgatcccgctgttatacagttctttcccgtctccggtgattttgaagactacacttcccttttccacttccccgtttccttttcccgtaccgacatattgtttgcggccgtttgtctggtcgtaaaagagcatcgttccgtcggtcaaaggaatcttggcaagatggctgtccttgtaattaaccgactggtcgttgacaccgatcttgcatgtgaaaagggtagattttccctgaagtgaaatctttattttactgtttgcctgtacacctacgccatccgcaaaaagcgtaccggcaacctgtaaaggttcgccggtgactgctttgccggatgccggagtcccgtatggctgatagatggaggacagatccatctccgacagttttatcttgccagtctgggctatcagactgggagtaacacaacataaacctgcaatcagaagttgttttattgtcataatatgatctttttgaggaggttattcacccaggttttcaaagatattgccttcatggatttcatctgcctcgatttcgtctttataatattcggcggcgagacggacatactttttatacaggcgggtagcggtttccacttcatccccttgcgtgataggcgtgcggactttgtcaggagaggaaacgaactgaagttcccaatctcccagagcactgtagaaatcattagcacggaaggcttcacgaccgtgcgtttgcggcaagccttcttcgttgtagcttgtcccggcatcgagatgatcctgaagcatcgcgtagaacttttcccaacgtttcaaataatatccgtctatcaatcccgtccattcccgccaggagtagtcgaagataagcggatcaccatcagctccccacacggtgacaagcgcggtcgcatctttttcaaagaggtctttttcttcattattattcccccagctacgggcctgcgtcaaccatttatcaaaattaaattccggacgcgtacgcaacagttcatcggcatcgcgcaacatttcgagaaaacggctgctatgcagggtgaatgcttccttgtcttttttacggaacgcctctgccgcctgtttatggatagcctgtccgaggttggacatcagctgccgctggacatcgacaatatcgaagcgataaggatcggaacctttcagtctgccggcatctttcagcaataagccttcggcctgaactaccaacagaggagagtagggaatccccagaccggcgttcggaccggatttctttacgttcacagcaggacgggcggcgatgatggaactgcgttccgtcccgtttgttccggggcgatagggcccttccaacagatgcaaccaagcctgatgcgcgttttcggacggtctgccgtagcgacggtctgcgtaacggcagagccattcttcgatattgacttcatctttatggagaggcatttcgaaagccagatcataatataccggattttgctcgatagactccataaagagaccggaaccacaaacattcggattctttttcaccgcatttacatattggttggaagcaagcagacgcaaatctccgtgcaggttgatacgccccccgaagttatgcagatttccggcaacaagcggatacccccagcaagcattttcctgctggctcttggctccgttcaggtccaggatcagcagattctctttcggaacagctttcacgatcggttcgcgaaggctccatgcctgcattgcccaaatcgaattcgggtcaaaatcgttgaagagtttgtgaatggaattgccgacggcgctcagatattccggtgtatcgacaggcggttggctttcgtggaacggatcagccgcataaacgccatgcgctccgtagagttttttttcttcttccaggaagtcacgtccgatcacagtgaacaaagaatcggtcgggtccaactgcgccgccccggtgaaaccgcaccaggaaggttgcaactgtatcttggcatccgggtatttttctttcagctcacgcggaacatagccggaaaatccttgttgaatgggttgcatacccaattccaattcccggtcgataatctgttttcccaaaacgatatgcttgtcgatccaagatttggggagcggacctccataactttgcaagttctgcatccattgccatgcaaaatgtcccggaccggccaggaaccggcgtgcctcttcatccgtaaacttatgcttgagaagggtattgtaccagactgcttccagtccgacaacagacaacggcatattaatcgagttcattgccataaagtcaagctctcgctgccagcgttcccaatcccaccaggcagccgagtagctgaccgtacaataattcatgtagatacgatatttgccattgatcgtgtttttaacggggacgggcataggcaattgcttcggcaggtccagttgattgccgaaccaggaaacatgtgcattacaggtgtatttcaaatattggttgaatgccgtcgccagtgagaccgtattgtttccacgcagtacgactttgccgttgtcggacgtgatctcgtacgcatccattccatcgacaggttccattaattccagtttgaattgtttcccgtatccgggagtcacacgttcgatcaagtcgtaggccgcctgtatccgcgggtcatttttacatcctgtacacaccaggatgaaggtaagcagtagtaatttaagtttcattctatttgttagttgaattagatattacaaatgtcattcgatgatgtaccaattatagccttttgccggaatccgtatcttcagtgagatggaataatcgcgggcgagcgagtactccttcccgtttttgtcctgttccttcacgattgccttatccgtcagtcccgtataatataaagggactttgatttctttctctatcgcgatgtccaacggattatagacggaaataaaggctttccgcttcgactgcgggttgacatgcatgatgccgtcccagtcctgtccgtccggacgcctcaggtggataatatccgaatccaggatttggcggtactgcttgtagaaagaaacccattgggccaccagtctccgggtttgttccgtgtcatagaggcggggaccgcgatagcaagcttgcacaccggcgccgaacaggttacgaagccgtgtctcgtaatgatccaaatgttcgttcaacggttcgatagtggcagccgccccaccaccgtgatattgggtaagagggacaaacataaatcccatgctgggcgttttctgccaggttccgtcgtagatattctgccgttcgataatttcctgataggctcttggcagggaccagttggtttcgacgtaccccatcggagttttgttggaacccatcagaaaataccaatccgggacattcagatagatgccgtttgcccggctccactgatagaacgaactgatccttttccactgtttccactgcgaatccagataccctttgtgtccgctgtggacggtggaggcacagggatcgccagggtaggaaccgtcgttctcgaatacgttcatgccggtcgtattgaagaaatccttcagacgcttgaaataatcactgccccaatccgaagcgatacaaggggaaagcccgaaacgactgccttcttcgcgtgtctttgccggatgtcctgtgtgatggctgatcgcagcatcttcaggtttggctccacggcttgccagcaatgaatagccgccgatagcgatacctttgtcagcagcataaccgttcaatgctttcatgcgttggagataggaggccgaatcattttcgatctggaaaccgctgccgaaggtcatgatcaccatttcgaaaccgacagccgcacattggtcgattgcctgtttgacagcctggtcacttgattcccttacgtgcataaagatcggattctcctgtgtccagggagccatcatgcgccagaatttacactcggcaagccctcgtctttcctggtctgtcgcgtcgcggagcatttcgaaagcacggcaggatgtgaaactttctcccggtgcgatctcttcggccggccctaatagcggcgtcacttccaaccgcgccggcttatattggccgtaatagcggatacccgtaaactcatattccggatgatcgaatacccaacggacggcaggattgtctttcattgcttccatatctccgcccattgcatagtccgtaacgacgaatagttgggtgaagcggtcgatatagtcacgcggagcatctgtctgtactggtcttttgcgataatcttccgtatagtatcccgttttttgtgccatcatgcgcacctcatggggctcaccatagtggactttcggggcagtctcaaccaacgcaagaacttctgatttgaatgaatccagtgtaacagccttttgtccgttgttttcgatctcgatccatttagacaggatcggagctccatcatatagttcatagacgatacggatggttaaccctttgcattcgtctacaatttttcggggagccctataagtgaaggtgatgcgtttgccgggcacaggccacggatatcgattgctaatccaggcctcgttcggtttccaaggaaagcgttcttttgtttcgctaaccgtataaccggccaaaacaaatgccgaatcgcacagctgcatgccagacaggaaatcttttgtcaggaaattatggacaggctgcccttccaaacctccgactggatactcttttccattgatgacaagcacggcttccggtcgcacggcacgcaattcgttttgtcccgtcatcagattatctagtgcgattgtcgcaccgttgggtgttagtgaaaaggaacgacgaagaagaccgtttgtcaattcaatttgtttcttatccgatgaaagattgacctccgtcttatacgggcttccgtcgatcagccaatccttgttttcggcaaagagcgattgctgtaacaggatacagcaaaaagtaagaattgtgtttttcatgtgtgattattattttttactgatgtcctatagacgaacaaaaaaagcgttaccctatggcgggtgacgcttttttgttattgcactattttcaggctcctcaaatcactgccagagacattctggaatacgctgagtccgaattccgggattacggccagcacatggtcgaatacgtcggattgaatgccttcgtaaggaacccagtctttcacggaggagaagaaataaagttcgatcggaataccggtttctgtcggttgcaactggcggaccatgcaagtcagttccttactgacctccgggaggcttttcagataattgaccaagtaggcgcgaaacacaccgatattcgtttgccgacggccgtttacgcggatggaatcgtcgatccggtgcgcctcgttataggcgttcagttctttttctttctcgtcgatatagtctgtcagcaaggagattttgcggaatttggccaacatctcaggagtacagaaactcacgctgttcatatcgatattgatggagcgcttgatccgccgtccgggagattctgacatcccacgccagttctggaaagcatcgctcactaaggcataagggggaatcgtcgtgatcgtattgtcgaagttcttgactttgactgcgttcagcgtgacttcgataaccgtcccgttcgccccatatttctccatcgtgatccagtcgcccggacgcagcatatcgttggcggaaagctgtatgccggctacgaatcctaagagcgtatccttaaacaccagcatcaggatagcggcggaagcgcctagtccggcgaacagcgtcgttggtgatttgccgatcagaatgctgatgatcagtataaaaccaataaaaaaaacggctacctgcaatagttggatgaaacctttcagcggcttgttcttgagtgattccttccggttatatatttcatgcacgacgttcagggaggcactgatgaaacgaagtgaaacggcaatgatgtagatcttgcatatcatttgcaggattcccaatatcttgggcgtctcatcaaccgggaaagccagtggcaacagcacatacaccaggatggcagggatcatgtgcatcagcttgttgataatcttgcgctcaacgatcaagtcgtcccattggttgcgggttctcttcgcaagccgtttgaacatattcagaaaaatatagcggcaagcatagtcgatgccgaccgttacggcaatgatcagcagcaggacgatcgtattgtccagttcatttgccgaactgctgataatcccccattcgatcaaatgattgttaatccattcttgtattgcgtgcatatctttaaatgattagttaagtatacttgtgataaccttgaatttgtatacaaaactaactaataaaaatacaatattccccataaaaagcgataaaaaggtcattttttgagatacagccgattaccaaataaaaatattacccctgtgggaaaatcaattttcatgcccatgtgtttcggtttggaccaatgggtattttcacaaatttggcaataaagtctgttttttcattatccttactccgaatattggtaaacctttaattcgaacttgggaatcattgcgaagaaatggtcgaagatgtccgactggatacgttcgtattccttccatattttattgcgggagaagaaatagatctggataggtacgccatattcagtcgattgcaactggctgatgattaaatcgagatcggtgttgacgaccggaaggcttgtcaggtatttctccacatagacacggaacatctgcgaattggtaggtgtcacgccttcgtccggcttgtagtcggcaagcaaagggatttccttgcggaatgtgttgagcatgtccggagtacagaacttgatggtattgaggtcgagaaaaatggacttcatcacacggcggcctcccgattcgaccatgccccgccagttctgaaacgaagcgcttaccaatgtataaggcgggatggtggaaatggtattatcgaaattctgaatcttgactgtgttcagcgtaatttcctgtacgataccgttcgcgtttgaaccaggaaccgtgatccagtcgcccggccgcagcatatcgttggcggaaagctgtatgcccgccacgaatcctaaaatcgtatccttgaataccaacatcaggattgctgccgaagcacccaatccggcaaacaggctggctggcgatttcccgatcaagatggctataatgacgattccgccgataaagaacagtaagacctgaagcacctgcatgaatcctttaatcggacggttcttgttcacctgccgcatgttatacatatcgaggaacactaaaataaaaccatttatcgccaataacaaagcgaacacgatatacacagcacatattttctgagacaaaagcaacaaacctttccctcgtataaacgccagaggcaacaaggcatagaccaagatacccggtattgtgtggaccaagtggtggacaactttacgtttgagaagcaacgaatcccattgataatgtgtatgctgcgcgagctttttcatgctgccgacaaagatcgcttggcacaggtaatccaacccgatcgccagtatgactagcaatgcagcaatgatcatttcgtcgaaagtatttgcaattttagggtctacgccccaaccgatcaggatgccgttcatccaactgcctagatttatcatatcgtatttgctttttattgaataacaattaaatattcgtttggtttatcgcacgaatcgtaaatatctgattaattcattatctttgcctgtaatattacaattctgtggcatgaccgtgaaattaaaagtagtgatgatggtattcgcatgttgttcttatcaatcgcaagcagaggacttgaacgctctcaaagtaaaagaatatagactggaaaacggactgactgtttggctgaacgaagatcatagtcaaccgaaagttttcggcgccgttgtcgtgaaagcaggagcaaaagattgtccggatacaggtatcgctcactatttcgagcatatgatgtttaagggaacagaccgcatcggaacgcttgattacgagtcggagaaagtcttgctggattccattgccatgaaatatgacgaactggccatgacggaggataccgcggcacgtgctcgtctgcaaaaggagatcaacgaactgagcatccgctcttccgaatatgtcattccaaatgagttcaaccggctcatcaaccggttcggcggttccggtctgaatgcggcgacctcatacgatgctacaatctatttcaatacgttttctccgcaatatatggttcaatgggcggagatcaacagcgaacgcctgattaaccccgtattccgtcttttccaaagcgaactggaaacggtttatgaggagaagaacatgtatggtgatttcatcggtggccaggtgatggacacattgatggcacgctatttcggtccacacccgtatgcttacccaattatcggcagcacgaaaaacctcaagaacccgaggctgacggaaatgcacaagttcttcgaggactattacgtggcatccaatatggcactaatccttagtggtgatttcgatgcacagcaggttatgcctatattggaaaaggccttttcacgaatccgttcgggcaatgcgccgaaacaggagaaagtgatgctcccgcccttcaacggacgggagacaatgaaggtaaagttcccgatcccctttattaaggcgatggggcttggtttccggggtgtttcggccaaccacgaggaccaggtagccttgaatattgcggtcaacttgttgaataacgccaacggtacgggttatctggacaaactgatggtggaacataagttgatgggagctcttgccatcaacgagagcatgaatgaagcgggaatcttggcggtcgctattatgccgaaattgttgatccagtcgtacagttcggcagagaagatggtctgggacgagatcaaccgagtgaagaacggagatttcagtgatgaaatgttcaacagcttgaaactggaacagaaacggcagtatgcttcctcattggaaaatatcgactcacgtgcgacaatcatgatgaatctgttttctcaaggaaagagttggaacgattatctgaacgaagtggcacggatcgaatccatcacgaaagaggatgtcgtgcgggtcgcccaaaaatatttcagcaataactatttgtgcgtaaccaagagcacagggaaatatccaaaagacaatttgccgaaaccagctttctctccggttgttccccggaatgcagacgcttcgtcttcttatgccaaacagttggagaagataccggaacaacaagtcgcacctcgtatcatcgatttcgaaaaggatgtgaagacgtcaaagttgactcctttggtgacgttgtacacgacacctaatccgctgaacgatatttttactttgaacatctcctacgggatcggtgccttggaacagccggaattgatgcagctcaccaactatctgcaattattagggaccgagtctttatctttcgagcagttccgcagccgtttgcaatcgatcggaagcacgcttgcattcgatgtaacacccgatgcttttgtcatgaaggtgactggtttcgataaccatattgacgaaacgatgaaacttgtgggtgactttatccgccatgcaaaggctgacgacaagaagctacgtcagattgtggacgatgccaaagtctcggagaaagcctttttcaagtcgggcgacaatgtggcatcagctttgttagaacaggtaaagtacggtgatcagtcccgttacctgcgtaaactttcactctcgcaaatcaagaaattgaagggtaaagatatgttggcgatctacgataaagtacggagcgtacagtgcgaccttcactactgcggcacattgcctgtagaaaaggtgatcgggacgattcgccagcatctcccactggagcggacgaccgttgcctccaattctccctattaccgtgagttgaaacaatacgaccggccgaccgtcttttttatcgatatgccggatatggcgcagagcatcgtttacggctatgtcaagggcgatccggtcgatgacaaggcttcccgccatgcctcccggctgttctctgtctacttcggaggcgatatgtcatcgctgatgtttcaagaaataagggaattccgttcttttgcataccggacaagcggtcgttaccagttgccgaaccatgcgcataaggggactgccggatcttttacggcgatgctgtccacccagagcgacaagacgctggatgcgctgggcgtactggattcgctgatccgggaaatgccgttgaagccggaaagggtggaggcggtcaagcagacgttggtgaaccgcatcaataacgattatccgcctttccgcaacctgtccgagaaagtggcgagtgcgcgtatggaaggtttcgaccgtgatccggctgaagaattcctgcgggatatagcaacgatggacatgcaggatatttcccgtttctaccgggagcagatcagtggccgcccggtcgtttacgtgattgctgggaatcggaaacatatcgatatgaagaagctggccgaatacggtacgataataaaagtgaaaaagaaagacatatataaataaatgtatagtaaagacgaactcaagaacctgaaacttgaattttgggaaagtttcgccgcattttgtgaagtacagccgtatctgagaggacgcaagaaaacgtgggttttatatgatacgaaagtgaaaggggtcgaactcaaattcgatgcgacaagagagggtgcgtttgtcatcctcgaagtgaaccataggagcgaagaggcccggctggagatgttcgaacgcctgacgtggtataaggatacgctggaaatggattttccggaggggttgacttgggacatttgtttcgtgcgcgataccggaaagcaggtggcccgtatttatacagccaaatccgggattgacttccaccgccgtcaggattggggagagtttttctcttttatggctagtcaaatgtatctgttggaacgaaacttcatgtccatagcagagtatttgagggaatgaaaagatttaaatcataatgaacactggaaatataaaacaatttataggagtggcagctatcagtttattgacggcttgcggtagtcctacacccgatgctgtgctgttgaaaccgggagtcagccgggaattggctcagttcaggaaagaacatttcaaggaggtacgttacaacctctttttttccatcccggaatcccgcgaagaagccgtcacaggcaaagcggatataacgcttgctatccgcgaaagactgccgattatcatagacttccgaggggaatcggaacaggtagcctcagttttgttga
